(19) United States
(12) Patent Application Publication
(10) Pub. No.: US 2007/0015146 A1
(43) Pub. Date: Jan. 18, 2007

(54) Molecular nephrotoxicology modeling

(75) Inventors: Donna L. Mendrick, Gaithersburg, MD (US); Mark W. Porter, Gaithersburg, MD (US); Kory R. Johnson, Gaithersburg, MD (US); Arthur Castle, Gaithersburg, MD (US); Brandon Higgs, Gaithersburg, MD (US); Michael Elashoff, Gaithersburg, MD (US)

Correspondence Address: MORGAN LEWIS & BOCKIUS LLP, 1111 PENNSYLVANIA AVENUE NW, WASHINGTON, DC, 20004, US

(73) Assignee: Gene Logic, Inc.

(21) Appl. No.: 10/301,856

(22) Filed: Nov. 22, 2002

Related U.S. Application Data
(63) Continuation-in-part of application No. 10/152,319, filed on May 22, 2002.
(60) Provisional application No. 60/292,335, filed on May 22, 2001.
(60) Provisional application No. 60/297,523, filed on Jun. 13, 2001.
(60) Provisional application No. 60/298,925, filed on Jun. 19, 2001.
(60) Provisional application No. 60/303,810, filed on Jul. 10, 2001.
(60) Provisional application No. 60/303,807, filed on Jul. 10, 2001.
(60) Provisional application No. 60/303,808, filed on Jul. 10, 2001.
(60) Provisional application No. 60/315,047, filed on Aug. 28, 2001.
(60) Provisional application No. 60/324,928, filed on Sep. 27, 2001.
(60) Provisional application No. 60/330,867, filed on Nov. 1, 2001.
(60) Provisional application No. 60/330,462, filed on Oct. 22, 2001.
(60) Provisional application No. 60/331,805, filed on Nov. 21, 2001.
(60) Provisional application No. 60/336,144, filed on Dec. 6, 2001.
(60) Provisional application No. 60/340,873, filed on Dec. 19, 2001.
(60) Provisional application No. 60/357,843, filed on Feb. 21, 2002.
(60) Provisional application No. 60/357,842, filed on Feb. 21, 2002.
(60) Provisional application No. 60/357,844, filed on Feb. 21, 2002.
(60) Provisional application No. 60/364,134, filed on Mar. 15, 2002.
(60) Provisional application No. 60/370,206, filed on Apr. 8, 2002.
(60) Provisional application No. 60/370,247, filed on Apr. 8, 2002.
(60) Provisional application No. 60/370,144, filed on Apr. 8, 2002.
(60) Provisional application No. 60/371,679, filed on Apr. 12, 2002.
(60) Provisional application No. 60/372,794, filed on Apr. 17, 2002.

(51) Int. Cl. C12Q 1/68; G06F 19/00; G01N 33/48; G01N 33/50

(52) U.S. Cl. 435/6; 702/20

(57) ABSTRACT

The present invention is based on the elucidation of the global changes in gene expression and the identification of toxicity markers in kidney tissues or cells exposed to a known renal toxin. The genes may be used as toxicity markers in drug screening and toxicity assays. The invention includes a database of genes characterized by toxin-induced differential expression that is designed for use with microarrays and other solid-phase probes.

### RELATED APPLICATIONS

[0001] This application is a continuation-in-part of U.S. application Ser. No. 10/152,319, filed May 22, 2002, which claims priority under 35 U.S.C. §119(e) to U.S. Provisional Application 60/292,335, filed May 22, 2001; 60/297,523, filed Jun. 13, 2001; 60/298,925, filed Jun. 19, 2001; 60/303,810, filed Jul. 10, 2001; 60/303,807, filed Jul. 10, 2001; 60/303,808, filed Jul. 10, 2001; 60/315,047, filed Aug. 28, 2001; 60/324,928, filed Sep. 27, 2001; 60/330,867, filed Nov. 1, 2001; 60/330,462, Oct. 22, 2001; 60/331,805, filed Nov. 21, 2001; 60/336,144, filed Dec. 6, 2001; 60/340,873, filed Dec. 19, 2001; 60/357,843, filed Feb. 21, 2002; 60/357,842, filed Feb. 21, 2002; 60/357,844, filed Feb. 21, 2002; 60/364,134 filed Mar. 15, 2002; 60/370,206, filed Apr. 8, 2002; 60/370,247, filed Apr. 8, 2002; 60/370,144, filed Apr. 8, 2002; 60/371,679, filed Apr. 12, 2002; and 60/372,794, filed Apr. 17, 2002, all of which are herein incorporated by reference in their entirety.

### SEQUENCE LISTING SUBMISSION ON COMPACT DISC

[0002] The Sequence Listing submitted concurrently herewith on compact disc under 37 C.F.R. §§1.821(c) and 1.821(e) is herein incorporated by reference in its entirety. Three copies of the Sequence Listing, one on each of three compact discs are provided. Copy 1 and Copy 2 are identical. Copies 1 and 2 are also identical to the CRF. Each electronic copy of the Sequence Listing was created on Nov. 21, 2002 with a file size of 1930 KB. The file names are as follows: Copy 1—g1508901us.txt; Copy 2—g1508901us.txt; CRF—g1508901us.txt.

### BACKGROUND OF THE INVENTION

[0003] The need for methods of assessing the toxic impact of a compound, pharmaceutical agent or environmental pollutant on a cell or living organism has led to the development of procedures which utilize living organisms as biological monitors. The simplest and most convenient of these systems utilize unicellular microorganisms such as yeast and bacteria, since they are the most easily maintained and manipulated. In addition, unicellular screening systems often use easily detectable changes in phenotype to monitor the effect of test compounds on the cell. Unicellular organisms, however, are inadequate models for estimating the potential effects of many compounds on complex multicellular animals, as they do not have the ability to carry out biotransformations.

[0004] The biotransformation of chemical compounds by multicellular organisms is a significant factor in determining the overall toxicity of agents to which they are exposed. Accordingly, multicellular screening systems may be preferred or required to detect the toxic effects of compounds. The use of multicellular organisms as toxicology screening tools has been significantly hampered, however, by the lack of convenient screening mechanisms or endpoints, such as those available in yeast or bacterial systems. Additionally, previous attempts to produce toxicology prediction systems have failed to provide the necessary modeling data and statistical information to accurately predict toxic responses (e.g., WO 00/12760, WO 00/47761, WO 00/63435, WO 01/32928, and WO 01/38579).

### SUMMARY OF THE INVENTION

[0005] The present invention is based on the elucidation of the global changes in gene expression in renal tissues or cells exposed to known toxins, in particular renal toxins, as compared to unexposed tissues or cells as well as the identification of individual genes that are differentially expressed upon toxin exposure.

[0006] In various aspects, the invention includes methods of predicting at least one toxic effect of a compound, predicting the progression of a toxic effect of a compound, and predicting the renal toxicity of a compound. The invention also includes methods of identifying agents that modulate the onset or progression of a toxic response. Also provided are methods of predicting the cellular pathways that a compound modulates in a cell. The invention also includes methods of identifying agents that modulate protein activities.

[0007] In a further aspect, the invention includes probes comprising sequences that specifically hybridize to genes in Tables 1-5. In some instances, the genes are rat genes. Also included are solid supports comprising at least two of the previously mentioned probes. The invention also includes a computer system that has a database containing information identifying the expression level in a tissue or cell sample exposed to a renal toxin of a set of genes comprising at least two genes in Tables 1-5.

### DETAILED DESCRIPTION

[0008] Many biological functions are accomplished by altering the expression of various genes through transcriptional (e.g. through control of initiation, provision of RNA precursors, RNA processing, etc.) and/or translational control. For example, fundamental biological processes such as cell cycle, cell differentiation and cell death, are often characterized by the variations in the expression levels of groups of genes.

[0009] Changes in gene expression are also associated with the effects of various chemicals, drugs, toxins, pharmaceutical agents and pollutants on an organism or cell. For example, the lack of sufficient expression of functional tumor suppressor genes and/or the over expression of oncogene/protooncogenes after exposure to an agent could lead to tumorgenesis or hyperplastic growth of cells (Marshall (1991), Cell 64:313-326; Weinberg (1991), Science 254:1138-1146). Thus, changes in the expression levels of particular genes (e.g. oncogenes or tumor suppressors) may serve as signposts for the presence and progression of toxicity or other cellular responses to exposure to a particular compound.

[0010] Monitoring changes in gene expression may also provide certain advantages during drug screening and development. Often drugs are screened for the ability to interact with a major target without regard to other effects the drugs have on cells. These cellular effects may cause toxicity in the whole animal, which prevents the development and clinical use of the potential drug.

[0011] The present inventors have examined tissue from animals exposed to known renal toxins which induce detrimental kidney effects, to identify global changes in gene expression induced by these compounds. These global changes in gene expression, which can be detected by the production of expression profiles (an expression level of one or more genes), provide useful toxicity markers that can be used to monitor toxicity and/or toxicity progression by a test compound. Some of these markers may also be used to monitor or detect various disease or physiological states, disease progression, drug efficacy, and drug metabolism.

[0012] Identification of Toxicity Markers

[0013] To evaluate and identify gene expression changes that are predictive of toxicity, studies using selected compounds with well characterized toxicity have been conducted by the present inventors to catalogue altered gene expression. In the present study, indomethacin, diflunisal, colchicine, chloroform, diclofenac, menadione, sodium chromate, sodium oxalate, thioacetamide, and vancomycin were selected as known renal toxins.

[0014] Cephaloridine is an amphoteric, semi-synthetic, broad-spectrum cephalosporin derived from cephalosporin C. Cephalosporins are β-lactam-containing antibiotics which prevent bacterial growth by inhibiting polymerization of the peptidoglycan bacterial cell wall. The linear glycan chains (composed of N-acetylglucosime and N-acetylmuramic acid) are cross-linked to each other by the coupling of short chains of several amino acids, the coupling resulting from the action of a transpeptidase. It is believed that cephalosporins act by blocking the activity of the transpeptidase (Goodman & Gilman's The Pharmalogical Basis of Therapeutics 9^{th} ed., J. G. Hardman et al. Eds., McGraw Hill, New York, 1996, pp. 1074-1075, 1089-1095).

[0015] Cephaloridine is administered intramuscularly and is used to treat infections of the respiratory tract, gastrointestinal tract and urinary tract, as well as infections of soft tissue, bones and joints. Noted adverse effects include hypersensitivity reactions (such as anaphylactic shock, urticaria and bronchospasm), gastrointestinal disturbances, candidiasis, and cardiovascular and blood toxicity, in particular, toxicity to the hematopoietic system (cells responsible for the formation of red and white blood cells and platelets).

[0016] Although cephaloridine may be nephrotoxic at high dosages, it is not as harmful to the kidneys as are the aminoglycosides and polymixins. High dosages of cephaloridine may cause acute renal tubular necrosis (Cecil Textbook of Medicine, 20^{th} ed., part XII, p. 586, J. C. Bennett and F. Plum Eds., W. B. Saunders Co., Philadelphia, 1996) or drug-induced interstitial nephritis, which is accompanied by elevated IgE levels, fever, arthralgia and maculopapular rash. Renal biopsopy demonstrates edema and interstitial inflammatory lesions, mainly with lymphocytes, monocytes, eosinophils and plasma cells. Vasculitis of small vessels may develop, leading to necrotising glomerulonephritis (G. Koren, “The nephrotoxic potential of drugs and chemicals. Pharmacological basis and clinical relevance.,” Med Toxicol Adverse Drug Exp 4(1):59-72, 1989).

[0017] Cephaloridine has also been shown to reduce mitochondrial respiration and uptake of anionic succinate and carrier-mediated anionic substrate transport (Tune et al. (1990), J Pharmacol Exp Ther 252:65-69). In a study of oxidative stress and damage to kidney tissue, cephaloridine depleted reduced glutathione (GSH) and produced oxidized glutathione (GSSG) in the renal cortex. This drug also inhibited glutathione reductase and produced malondialdehyde and conjugated dienes (Tune et al. (1989), Biochem Pharmacol 38:795-802). Because cephaloridine is actively transported into the proximal renal tubule, but slowly transported across the lumenal membrane into the tubular fluid, high concentrations can accumulate and cause necrosis. Necrosis can be prevented by administering inhibitors of organic anion transport, although such treatment may be counterproductive, as cephaloridine is passed in and out of the kidney by the renal organic anion transport system (Tune et al. (1980), J Pharmacol Exp Ther 215:186-190).

[0018] Cisplatin (Pt(NH₃)₂(Cl)₂), a broad-spectrum anti-tumor agent, is commonly used to treat tumors of the testicles, ovaries, bladder, skin, head and neck, and lungs (PDR 47^{th} ed., pp. 754-757, Medical Economics Co., Inc., Montvale, N.J., 1993; Goodman & Gilman's The Pharmalogical Basis of Therapeutics 9^{th} ed., pp. 1269-1271, J. G. Hardman et al. Eds., McGraw Hill, New York, 1996). Cisplatin diffuses into cells and functions mainly by alkylating the N⁷ of guanine, a highly reactive site, causing interstrand and intrastrand crosslinks in the DNA that are lethal to cells. The drug is not sensitive to the cell cycle, although its effects are most pronounced in S phase.

[0019] Because the drug is cleared from the body mainly by the kidneys, the most frequent adverse effect of cisplatin usage is nephrotoxicity, the severity of which increases with increasing dosage and treatment terms. Other adverse effects include renal tubule damage, myelosuppression (reduced numbers of circulating platelets, leukocytes and erythrocytes), nausea and vomiting, ototoxicity, serum electrolyte disturbances (decreased concentrations of magnesium, calcium, sodium, potassium and phosphate, probably resulting from renal tubule damage), increased serum concentrations of urea and creatinine, and peripheral neuropathies.

[0020] In one study on rats (Nonclercq et al. (1989), Exp Mol Pathol 51:123-140) administration of cisplatin or carboplatin induced renal injury, carboplatin causing less damage than cisplatin. The most prominent injury was to the straight portion of proximal renal tubule.

[0021] In another rat study (Goldstein et al. (1981), Toxicol Appl Pharmacol 60:163-175) animals injected with cisplatin displayed decreased food intake as drug dosage increased. On day 2, the high-dose groups (10-15 mg/kg) exhibited a six or seven-fold elevation in BUN. On day 4, BUN elevation was noted in the 5 mg/kg group. An increase in urine volume was observed beginning on days 3-4, along with decreased urine osmolality in the low-dose groups (2.5 or 5 mg/kg). Another experiment on rats (Agarwal et al. (1995), Kidney Int 48:1298-1307) showed that cisplatin treatment produced elevations in serum creatinine levels, which began on day 3 and progressed for the duration of the study.

[0022] PAN (C₂₂H₂₉N₇O₅), an antibiotic produced by Streptomyces alboniger, inhibits protein synthesis and is commonly used experimentally on rats to mimic human minimal change disease. One study showed that PAN-injected rats demonstrated an increase in levels of serum non-esterified fatty acids, while the serum albumin concentration was negatively affected (Sasaki et al. (1999), Adv Exp Med Biol 467:341-346).

[0023] In another rat study, an adenosine deaminase inhibitor prevented PAN nephrotoxicity, indicating that PAN toxicity is linked to adenosine metabolism (Nosaka et al. (1997), Free Radic Biol Med 22:597-605). Another group showed that PAN, when administered to rats, led to proteinuria, a condition associated with abnormal amounts of protein in the urine, and renal damage, e.g. blebbing of glomerular epithelial cells, focal separation of cells from the glomerular basement membrane, and fusion of podocytes (Olson et al. (1981), Lab Invest 44:271-279). In another study on rats, administration of PAN induced glomerular epithelial cell apoptosis in a dose- and time-dependent manner (Sanwal et al. (2001), Exp Mol Pathol 70:54-64).

[0024] One study with PAN-injected rats (Koukouritaki et al. (1998), J Investig Med 46: 284-289) examined the changes in the expression of the proteins paxillin, focal adhesion kinase, and Rho, all of which regulate cell adhesion to the extracellular matrix. Paxillin levels increased steadily, peaked at day 9 after PAN injection, and then remained elevated even after proteinuria resolved. There was no observed change in expression of either focal adhesion kinase or Rho.

[0025] BEA, (C₂H₆BrN.HBr), is commonly used experimentally on rats to induce papillary necrosis and renal cortex damage, which is similar to human analgesic nephropathy. BEA-induced papillary necrosis in rats eventually leads to the onset of focal glomerular sclerosis and nephrotic proteinuria (Garber et al. (1999), Am J Kidney Dis 33: 1033-1039). Even at low doses (50 mg/kg), BEA can induce an apex limited renal papillary necrosis (Bach et al. (1983), Toxicol Appl Pharmacol 69:333-344). In male Wistar rats, BEA administered at 100 mg/kg was shown to cause renal papillary necrosis within 24 hours (Bach et al. (1991), Food Chem Toxicol 29:211-219). Additionally, Bach et al. showed that there was an increase in urinary triglycerides, and lipid deposits were seen by Oil Red 0 lipid staining in the cells of the collecting ducts and hyperplastic urothelia adjacent to the necrosed region.

[0026] It has also been shown that succinate and citrate concentrations are significantly lower in the urine of BEA-treated rats (Holmes et al. (1995), Arch Toxicol 70:89-95). Moreover, BEA treatment induced glutaric and adipic aciduria, which is symptomatic of an enzyme deficiency in the acyl CoA dehydrogenases. The same study examined urinary taurine levels in desert mice, and in BEA-treated desert mice there was an increase in the urinary taurine level which is indicative of liver toxicity.

[0027] Another study on BEA-treated rats showed that there was an increase in the concentrations of creatine in the renal papilla and glutaric acid in the liver, renal cortex, and renal medulla as soon as 6 hours post-treatment (Garrod et al. (2001), Magn Reson Med 45: 781-790).

[0028] Discovered and purified in the early 1960's, gentamicin is a broad-spectrum aminoglycoside antibiotic that is cidal to aerobic gram-negative bacteria and commonly used to treat infections, e.g., those of the urinary tract, lungs and meninges. As is typical for an aminoglycoside, the compound is made of two amino sugar rings linked to a central aminocyclitol ring by glycosidic bonds. Aminoglycosides are absorbed poorly with oral administration, but are excreted rapidly by the kidneys. As a result, kidney toxicity is the main adverse effect, although ototoxicity and neuromuscular blockade can also occur. Gentamicin acts by interfering with bacterial protein synthesis. This compound is more potent than most other antibacterial inhibitors of protein synthesis, which are merely bacteriostatic, and its effects on the body are, likewise, more severe (Goodman & Gilman's The Pharmalogical Basis of Therapeutics 9^{th} ed., pp. 1103-1115, J. G. Hardman et al. Eds., McGraw Hill, New York, 1996).

[0029] Aminoglycosides work rapidly, and the rate of bacterial killing is concentration-dependent. Residual bactericidal activity remains after serum concentration has fallen below the minimum inhibitory concentration (MIC), with a duration that is also dosage/concentration-dependent. The residual activity allows for once-a-day administration in some patients. These drugs diffuse into bacterial cells through porin channels in the outer membrane and are then transported across the cytoplasmic membrane via a membrane potential that is negative on the inside (Goodman & Gilman, supra).

[0030] Kidney damage, which can develop into renal failure, is due to the attack of gentamicin on the proximal convoluted tubule, particularly in the S1 and S2 segments. The necrosis, however, is often patchy and focal (Shanley et al. (1990), Ren Fail 12:83-87). A rat study by Shanley et al. showed that superficial nephrons are more susceptible to necrosis than juxtamedullary nephrons, although the initial segment of the superficial nephrons is remarkably resistant to necrosis.

[0031] Reported enzymatic changes upon gentamicin treatment are increased activities of N-acetyl-beta-D-glucosaminidase and alkaline phosphatase and decreased activities of sphingomyelinase, cathepsin B, Na⁺/K⁺-ATPase, lactate dehydrogenase and NADPH cytochrome C reductase, along with decreased protein synthesis and alpha-methylglucose transport (Monteil et al. (1993), Ren Fail 15:475-483). An increase in gamma-glutamyl transpeptidase activity in urine has also been reported (Kocaoglu et al. (1994), Arch Immunol Ther Exp (Warsz) 42:125-127), and the quantification of this enzyme in urine is a useful marker for monitoring gentamicin toxicity.

[0032] One source of renal pathology resulting from gentamicin treatment is the generation of reactive oxygen metabolites. Gentamicin has been shown, both in vitro and in vivo, to be capable of enhancing the production of reactive oxygen species. Iron, a necessary co-factor that catalyzes free-radical formation, is supplied by cytochrome P450 (Baliga et al. (1999), Drug Metab Rev 31:971-997).

[0033] A gene delivery experiment in rats, in which the human kallikrein gene was cloned into an adenovirus vector and the construct then co-administered with a gentamicin preparation, showed that kallikrein can protect against gentamicin-induced nephrotoxicity. Significantly increased renal blood flow, glomerular filtration rates and urine flow were observed, along with decreased renal tubular damage, cellular necrosis and lumenal protein casts. Kallikrein gene delivery also caused a decrease in blood urea nitrogen levels and increases in urinary kinin and nitrite/nitrate levels. This study provides evidence that the tissue kallikrein-kinin system may be a key pathway that is perturbed during the induction of nephrotoxicity by gentamicin (Murakami et al. (1998), Kidney Int 53:1305-1313).

[0034] Ifosfamide, an alkylating agent, is commonly used in chemotherapy to treat testicular, cervical, and lung cancer. Ifosfamide is slowly activated in the liver by hydroxylation, forming the triazene derivative 5-(3,3-dimethyl-1-triazeno)-imidazole-4-carboxamide (DTIC) (Goodman & Gilman's The Pharmacological Basis of Therapeutics 9^{th}ed., p. 1235, J. G. Hardman et al., Eds., McGraw Hill, New York, 1996). Cytochrome P450 activates DTIC via an N-demethylation reaction yielding an alkylating moiety, diazomethane. The active metabolites are then able to cross-link DNA causing growth arrest and cell death. Though ifosfamide is therapeutically useful, it is also associated with nephrotoxicity, urotoxicity, and central neurotoxicity.

[0035] Mesna, another therapeutic, is often administered concomitantly to prevent kidney and bladder problems from arising (Brock and Pohl (1986), IARC Sci Publ 78:269-279). However, there are documented cases in which tubular toxicity occurred and elevated urinary levels of alanine aminopeptidase and N-acetyl-beta-D-glucosaminidase were found in patients even though mesna was administered alongside ifosfamide (Goren et al. (1987), Cancer Treat Rep 71:127-130).

[0036] One study examined 42 patients that had been administered ifosfamide to treat advanced soft-tissue sarcoma (Stuart-Harris et al. (1983), Cancer Chemother Pharmacol 11:69-72). The ifosfamide dosage varied from 5.0 g/m² to 8.0 g/m², and all of the patients were given mesna to counteract the negative effects of ifosfamide. Even so, nausea and vomiting were common to all of the patients. Out of the 42 patients, seven developed nephrotoxicity, and two of the cases progressed to fatal renal failure.

[0037] In another clinical study, renal tubular function was monitored in 18 neuroblastoma patients (Caron et al. (1992), Med Pediatr Oncol 20:42-47). Tubular toxicity occurred in at least 12 of the patients, and seven of those patients eventually developed Debre-de Toni-Fanconi syndrome, although in 3 cases the syndrome was reversible.

[0038] Fanconi syndrome is a disorder marked by dysfunction of the proximal tubules of the kidney. It is associated with aminoaciduria, renal glycosuria, and hyperphosphaturia. Ifosfamide is often used experimentally on rats to induce Fanconi syndrome. In one study, rats that were administered 80 mg/kg of ifosfamide had significantly lower body weight and hematocrit than control rats (Springate and Van Liew (1995), J Appl Toxicol 15:399-402). Additionally, the rats had low-grade glucosuria, proteinuria, and phosphaturia. In a mouse study, ifosfamide induced elevated serum creatinine and urea levels and decreased the clearance rate of creatinine (Badary (1999), J Ethnopharmacol 67:135-142).

[0039] Cyclophosphamide, a nitrogen mustard and alkylating agent, is highly toxic to dividing cells and is commonly used in chemotherapy to treat malignant lymphomas, such as non-Hodgkin's lymphomas and Burkitt's lymphoma, multiple myeloma, leukemias, neuroblastomas, ovarian adenocarcinomas and retinoblastomas, as well as breast and lung cancer (Goodman & Gilman's The Pharmacological Basis of Therapeutics 9^{th} ed., pp. 1234, 1237-1239, J. G. Hardman et al., eds., McGraw Hill, New York, 1996; Physicians Desk Reference, 47^{th} ed., pp. 744-745, Medical Economics Co., Inc., Montvale, N.J., 1993). Additionally, cyclophosphamide is used as an immunosuppressive agent in bone marrow transplantation and following organ transplantation. Although cyclophosphamide is therapeutically useful against certain types of cancer, it is also associated with cardiotoxicity, nephrotoxicity (including renal tubular necrosis), hemorrhagic cystitis, myelosuppression, hepatotoxicity, impairment of male and female reproductive systems, interstitial pneumonitis and central nervous system toxicity.

[0040] Once in the liver, cyclophosphamide is hydroxylated by the cytochrome P450 mixed function oxidase system, producing the active metabolites phosphoramide mustard and acrolein, which cross-link DNA and cause growth arrest and cell death. These metabolites, however, are highly toxic and cause adverse effects in the other organs into which they are transported, such as the kidneys. Acrolein is removed from the kidneys by secretion into the urine, resulting in cystitis (inflammation of the bladder), often hemorrhagic cystitis.

[0041] In the kidney, cyclophosphamide induces necrosis of the renal distal tubule. Cyclophosphamide, which is structurally similar to the anti-cancer drug ifosfamide, does not induce damage to the renal proximal tubule nor does it induce Debre-de Toni-Fanconi syndrome (Rossi et al. (1997), Nephrol Dial Transplant 12:1091-1092).

[0042] One clinical trial of patients being treated with cyclophosphamide showed that renal damage from the drug leads to a reduced biotransformation rate and low renal clearance of the drug, resulting in a build-up of toxic alkylating metabolic products (Wagner et al. (1980), Arzneimittelforschung 30:1588-1592).

[0043] In a study of patients suffering from malignant lymphomas and mammary carcinomas, a direct relationship was found between the dose of cyclophosphamide used in treatment and the concentration of alkylating metabolites in the patients' urine. The upper limit of the dose was determined by the nature and degree of the toxic side effects, rather than by the rate at which the drug could be metabolized (Saul et al (1979), J Cancer Res Clin Oncol 94:277-286). It is the acrolein itself that is toxic, not the alkylating activity of cyclophosphamide (Brock et al. (1979), Arzneimittelforschung 29:659-661). A study on rats also showed that acrolein from the kidneys can produce hemorrhagic cystitis and that the acrolein concentration is directly related to the frequency and severity of the cystitis (Chijiwa et al. (1983), Cancer Res 43:5205-5209).

[0044] Carboplatin, a platinum coordination complex, is commonly used in chemotherapy as an anti-tumor agent. As a chemotherapeutic agent, carboplatin acts similarly to cisplatin. Carboplatin enters the cell by diffusion where it is activated by hydrolysis (Goodman & Gilman's The Pharmacological Basis of Therapeutics 9^{th} ed., p. 1270-1271, J. G. Hardman et al. Eds., McGraw Hill, New York 1996). Once activated, the platinum complexes are able to react with DNA causing cross-linking to occur. One of the differences between carboplatin and cisplatin is that carboplatin is better tolerated clinically. Some of the side-effects associated with cisplatin, such as nausea, neurotoxicity, and nephrotoxicity, are seen at a lesser degree in patients administered carboplatin. Some other side-effects are hypomagnesaemia and hypokalaemia (Kintzel (2001), Drug Saf 24:19-38).

[0045] In one study on male Wistar rats, carboplatin was administered at a dosage of 65 mg/kg (Wolfgang et al. (1994), Fundam Appl Toxicol 22:73-79). After treatment with carboplatin, CGT excretion was increased approximately two-fold.

[0046] Another study compared cisplatin and carboplatin when given in combination with vindesine and mitomycin C (Jelic et al. (2001) Lung Cancer 34:1-13). The study showed that carboplatin administered with vindesine and mitomycin C was advantageous in terms of overall survival, although the regimen was more hematologically toxic than when cisplatin was given.

[0047] AY-25329, is a phenothiazine that has been shown to be mildly hepatotoxic and to induce nephrosis. Its structure is shown below.

[chemical structure]

[0048] Phenothiazines are a class of psychoactive drugs. They have been used to treat schizophrenia, paranoia, mania, hyperactivity in children, some forms of senility, and anxiety (http://www.encyclopedia.com/articlesnew/36591.html). Some side effects associated with prolonged use of the drugs are reduced blood pressure, Parkinsonism, reduction of motor activity, and visual impairment.

[0049] Chlorpromazine (Thorazine or Largactil) is an aliphatic phenothiazine and is widely used for treating schizophrenia and manic depression. Prolactin secretion is increased while taking chlorpromazine, and galactorrhea and gynecomastia have both been associated with the drug (http://www.mentalhealth.com/drug/p30-c01.html). Trifluoperazine is another prescribed phenothiazine. It is used to treat anxiety, to prevent nausea and vomiting, and to manage psychotic disorders (http://www.mentalhealth.com/drug/p30-s04.html). Negative side-effects that have been associated with the drug are liver damage, bone marrow depression, and Parkinsonism.

[0050] Acyclovir (9-[(2-hydroxyethyl)methyl] guanine, Zovirax®), an anti-viral guanosine analogue, is used to treat herpes simplex virus (HSV), varicella zoster virus (VZV) and Epstein-Barr virus (EBV) infections. It is transported into cells by the nucleoside transporter that imports guanine, and acyclovir is phosphorylated by virally encoded thymidine kinase (TK). Other kinases convert acyclovir to its activated di- and triphosphate forms, which prevent the polymerization of viral DNA. Acyclovir triphosphate competes with dGTP for the viral polymerase, and acyclovir is preferentially incorporated, but as a monophosphate. As a result, chain elongation ceases (Fields Virology 3d ed., Fields et al., eds., pp. 436-440, Lippincott-Raven Publishers, Philadelphia, 1996; Cecil Textbook of Medicine, 20^{th} ed., part XII, p. 1742, J. C. Bennett and F. Plum Eds., W. B. Saunders Co., Philadelphia, 1996).

[0051] The pharmacokinetics of acyclovir show that it has a useful half-life of about three hours and that most of it is excreted in the urine largely unchanged (Brigden et al. (1985), Scand J Infect Dis Suppl 47:33-39). Not surprisingly, the most frequent adverse effect of acyclovir treatment is damage to various parts of the kidney, particularly the renal tubules. Crystalluria, or the precipitation of crystals (in this case, crystals of acyclovir), in the lumina of the renal tubules can occur (Fogazzi (1996), Nephrol Dial Transplant 11:379-387). If the drug crystallizes in the renal collecting tubules, obstructive nephropathy and tubular necrosis can result (Richardson (2000), Vet Hum Toxicol 42:370-371). Tissues from biopsies of affected patients showed dilation of the proximal and distal renal tubules, with loss of the brush border, flattening of the lining cells and focal nuclear loss (Becker et al. (1993), Am J Kidney Dis 22:611-615).

[0052] Citrinin, a mycotoxin produced by the fungus Penicillium citrinum, is a natural contaminant of foods and feeds (Bondy and Armstrong (1998) Cell Biol. Toxicol. 14:323-332). It is known that mycotoxins can have negative effects on the immune system, however citrinin-treated animals have been shown to stimulate responses against antigens (Sharma (1993) J Dairy Sci. 76:892-897). Citrinin is a known nephrotoxin, and in birds such as chickens, ducklings, and turkeys, it causes diarrhea, increased food consumption and reduced weight gain due to kidney degeneration (Mehdi et al. (1981) Food Cosmet. Toxicol. 19:723-733; Mehdi et al. (1984) Vet. Pathol. 21:216-223). In the turkey and duckling study, both species exhibited nephrosis with the occurrence of hepatic and lymphoid lesions (Mehdi et al., 1984).

[0053] In one study, citrinin was administered to rabbits as a single oral dose of either 120 or 67 mg/kg (Hanika et al. (1986) Vet. Pathol. 23:245-253). Rabbits treated with citrinin exhibited renal alterations such as condensed and distorted mitochondria, distended intercellular spaces of the medullary and straight cortical distal tubules, and disorganization of interdigitating processes. In another rabbit study, citrinin-administered rabbits displayed azotaemia and metabolic acidosis (Hanika et al. (1984) Food Chem. Toxicol. 22:999-1008). Renal failure was indicated by decreased creatinine clearance and increased blood urea nitrogen and serum-creatinine levels.

[0054] In the past, mercury was an important component of pharmaceuticals, particularly of antiseptics, antibacterials, skin ointments, diuretics and laxatives. Although, mercury has been largely replaced by more effective, more specific and safer compounds, making drug-induced mercury poisoning rare, it is still widely used in industry. Poisoning from occupational exposure and environmental pollution, such as mercury release into public water supplies, remains a concern as wildlife, domestic animals and humans are affected.

[0055] Because of their lipid solubility and ability to cross the blood-brain barrier, the most dangerous form of mercury is the organomercurials, the most common of which is methylmercury, a fungicide used for disinfecting crop seeds. In a number of countries, incidents involving large-scale illness and death from mercury poisoning have been reported when mercury-contaminated seeds were planted and the crops harvested and consumed. A second source of organic mercury poisoning results from industrial chemicals containing inorganic mercury, such as mercury catalysts, which form methylmercury as a reaction product. If this waste product is released into reservoirs, lakes, rivers or bays, the surrounding population can become sick or die, particularly those who eat local fish.

[0056] The inorganic salt mercuric chloride, HgCl₂, as well as other mercuric salts, are more irritating and more toxic than the mercurous forms. Mercuric chloride is used today in industry, for the manufacture of bleach, electronics, plastics, fungicides and dental amalgams. The main source of human exposure is industrial dumping into rivers (Goodman & Gilman's: The Pharmacological Basis of Therapeutics (9th ed.), pp. 1654-1659, McGraw-Hill, New York, 1996).

[0057] When inorganic mercury salts are ingested, about 10% of the mercuric ions are absorbed by the gastrointenstinal tract, and a considerable portion of the Hg²⁺ can remain bound to the mucosal surfaces. The highest concentration of Hg²⁺ is found in the kidneys, as it is retained there longer than in other tissues. Consequently, the kidneys are the organ most adversely affected by inorganic mercury poisoning. The proximal tubules are the major site of damage, where tubular necrosis results. The mercury affects primarily the S2 and S3 portions of the proximal tubules, but, at high levels of mercury exposure, the S1 and distal portions of the tubules are also damaged. These regions of the nephrons are affected because they contain enzymes (such as gamma-glutamyltranspeptidase) and transport proteins (such as the basolateral organic anion transport system) involved in mercury uptake (Diamond et al. (1998), Toxicol Pathol 26:92-103).

[0058] Urinary markers of mercury toxicity which can be detected in NMR spectra include elevated levels of lactate, acetate and taurine and decreased levels of hippurate (Holmes et al. (2000), Chem Res Toxicol 13:471-478). Known changes in gene expression in kidneys exposed to Hg²⁺ include up-regulation of the heat-shock protein hsp72 and of the glucose-regulated protein grp94. The degree of tissue necrosis and level of expression of these proteins is proportional to both the dose of mercury (Hg²⁺) and the length of the exposure time to mercury (Hg²⁺), with hsp72 accumulating in the renal cortex and grp94 accumulating in the renal medulla (Goering et al (2000), Toxicol Sci 53:447-457).

[0059] Indomethacin is a non-steroidal antiinflammatory, antipyretic and analgesic drug commonly used to treat diseases such as rheumatoid arthritis, osteoarthritis, ankylosing spondylitis and gout. This drug acts as a potent inhibitor of prostaglandin synthesis; it inhibits the cyclooxygenase enzyme necessary for the conversion of arachidonic acid to prostaglandins (PDR 47th ed., Medical Economics Co., Inc., Montvale, N.J., 1993; Goodman & Gilman's The Pharmalogical Basis of Therapeutics 9th ed., J. G. Hardman et al., Eds., McGraw Hill, New York, 1996, pp. 1074-1075, 1089-1095; Cecil Textbook of Medicine, 20th ed., part XII, pp. 772-773, 805-808, J. C. Bennett and F. Plum Eds., W. B. Saunders Co., Philadelphia, 1996).

[0060] The most frequent adverse effects of indomethacin treatment are gastrointestinal disturbances, e.g., bleeding, ulcers and perforations, although renal toxicity can also result, particularly after long-term administration. In rats, hemorrhage and necrosis have been observed in the renal papillae and formix, as well as damage to the thick ascending limbs (mTALs), and interstitial nephritis with hematuria, proteinuria and nephrotic syndrome have been reported in humans. Patients suffering from renal dysfunction risk developing a reduction in renal blood flow and urinary outflow, because renal prostaglandins play an important role in renal perfusion and glomerular filtration (Heyman et al. (1997), Kidney Int 51: 653-663).

[0061] Diflunisal, a non-steroidal anti-inflammatory drug (NSAID), is a difluorophenyl derivative of salicylic acid (Goodman & Gilman's The Pharmacological Basis of Therapeutics 9^{th} ed., p. 631, J. G. Hardman et al., Eds., McGraw Hill, New York, 1996). It is most frequently used in the treatment of osteoarthritis and musculoskeletal strains. NSAIDs have analgesic, antipyretic and anti-inflammatory actions, however hepatotoxicity is known to be an adverse side effect of NSAID treatment (Masubuchi et al. (1998) J. Pharmacol. Exp. Ther. 287:208-213). Diflunisal has been shown to be less toxic than other NSAIDs, nevertheless over long periods of dosage it can lead to deleterious effects on platelet or kidney function (Bergamo et al. (1989) Am. J. Nephrol. 9:460-463). Other side effects that have been associated with diflunisal treatment are diarrhea, dizziness, drowsiness, gas or heartburn, headache, nausea, vomiting, and insomnia (http://arthritisinsight.com/medical/meds/dolobid.html).

[0062] Masubuchi et al. compared the hepatotoxicity of 18 acidic NSAIDs. In the study, diflunisal (administered at a concentration of 500 μM) was shown to increase LDH leakage in rat hepatocytes, a marker for cell injury, when compared to the control sample. In addition, treatment with diflunisal led to decreased intracellular ATP concentrations.

[0063] One study compared the effects of diflunisal and ibuprofen when given to patients over a two week period (Muncie and Nasrallah (1989) Clin. Ther. 11:539-544). In both the ibuprofen and the diflunisal group, two patients complained of abdominal cramping. The study indicated that even during short-term usage some gastrointestinal effects may occur. The toxic dose used in this study was chosen as one that did not induce significant gastric ulceration in rats. The group of rats given the high dosage of diflunisal had increased concentrations of creatinine which is consistent with renal injury, although dehydration may also cause increases in creatinine concentration.

[0064] Cidofovir (Vistide®) is an antiviral cytosine analog used in the treatment of viral infections such as herpesvirus, adenovirus, papillomavirus, poxvirus and hepadnavirus (Goodman & Gilman's The Pharmacological Basis of Therapeutics 9^{th} ed., p. 1216, J. G. Hardman et al., Eds., McGraw Hill, New York, 1996). It is also useful for the treatment of cytomegalovirus (CMV) infection, which is a type of herpesvirus.

[0065] Some mild side effects seen in patients receiving cidofovir are nausea, vomiting, and fever. The most serious reported side effect of the drug is kidney toxicity (http://tthivclinic.com/cido.html). In response to the threat of nephrotoxicity, it is necessary for patients receiving cidofovir to have their kidneys checked before treatment, and the patients must be monitored during treatment for early symptoms of kidney problems. In addition, cidofovir is given with fluids to help reduce the risk of kidney toxicity (http://www.aidsinfonyc.org/network/simple/cido.html). Probenecid, a drug that helps protect the kidneys, is normally administered concomitantly (Lalezari and Kuppermann (1997) J. Acquir. Immune Defic. Syndr. Hum. Retrovirol. 14:S27-31).

[0066] One study compared the safety and efficacy of cidofovir in the treatment of CMV (Lalezari et al. (1998) J. Acquir. Immune Defic. Syndr. Hum. Retrovirol. 17:339-344). Approximately 40% of the patients exhibited dose-dependent asymptomatic proteinuria and 25% of the patients had elevated serum creatinine levels.

[0067] Pamidronate (Aredia®) is a bisphosphonate drug that is clinically used to inhibit bone resorption and make bones more stable. It is used to treat hypercalcemia (too much calcium in the blood) that occurs with some types of cancer. Typically administered by intravenous injection, pamidronate is frequently used in patients with breast cancer or multiple myeloma whose disease has spread to the bones. Some side effects related to pamidronate treatment are abdominal cramps, chills, confusion, fever, muscle spasms, nausea, muscle stiffness, and swelling at the injection site (http://www.nursing.uiowa.edu/sites/PedsPain/Adjuvants/PAMIDRnt.html). Patients with kidney problems may be prohibited from using pamidronate as it is excreted through the kidneys.

[0068] In one study, rats and mice were given varying doses of labeled pamidronate (Cal and Daley-Yates (1990) Toxicology 65:179-197). Pamidronate treatment led to significant weight loss and a decrease in creatinine clearance. Morphological studies showed a loss of brush border membranes and the presence of focal proximal tubular necrosis.

[0069] Another study compared the tolerability of different treatments for hypercalcemia of malignancy by reviewing articles published between 1979 and 1998 (Zojer et al. (1999) Drug Saf 21:389-406). The authors found that elevated serum creatinine level, nausea, and fever were reported following treatment with bisphosphonates such as pamidronate.

[0070] Markowitz et al. (2001, J. Am. Soc. Nephrol. 12:1164-1172) tried to determine whether there was a correlation between pamidronate treatment and collapsing focal segmental glomerulosclerosis (FSGS). The authors examined the histories of seven patients who had developed collapsing FSGS, and they found that the only drug treatment in common was the administration of pamidronate. When given at the recommended dose of 90 mg per month, renal toxicity was rare. However, when pamidronate was given at higher doses nephrotoxicity occurred.

[0071] Lithium, an alkali metal, is the main pharmacological treatment for bipolar disorders. It is typically given as a salt, such as lithium carbonate or lithium citrate. Some common side effects of lithium treatment are an increase in urination, increase in drinking, dry mouth, weight gain, fine tremor, and fatigue. Some more serious side effects related to lithium treatment are blurred vision, mental confusion, seizures, vomiting, diarrhea, muscle weakness, drowsiness, and coarse tremor (Goodman & Gilman's The Pharmacological Basis of Therapeutics 9^{th} ed., p. 448, J. G. Hardman et al., Eds., McGraw Hill, New York, 1996).

[0072] Since lithium is often used on a maintenance basis for a lifelong period, numerous studies have been performed to try and elucidate the effects of lithium on the kidney. One group administered lithium in daily doses within the human therapeutic range to male Wistar rats (Kling et al (1984) Lab Invest 50:526-535). Rats that were given lithium developed marked polyuria within three weeks of the initial dosing. The rats displayed elevated free water clearance and vasopressin-resistant diabetes insipidus. The cortical collecting tubules displayed morphological changes, e.g. dilation of the tubules, bulging cells lining the tubules, enlarged nuclei, following lithium treatment.

[0073] Another study examined a human population that had been given lithium for the treatment of bipolar disorder (Markowitz et al. (2000) J. Am. Soc. Nephrol. 11: 1439-1448). The patients had a mean age of 42.5 years and had been undergoing lithium treatment from 2 to 25 years (mean of 13.6 years). Approximately one fourth of the patients had nephrotic proteinuria, almost 90% of them had nephrogenic diabetes insipidus (NDI), and renal biopsies revealed a chronic tubulointerstitial nephropathy in all of the patients. Following cessation of lithium treatment, seven of the patients proceeded to end-stage renal disease.

[0074] Even though nephrotoxicity is a known side effect of lithium treatment, some studies have indicated that in actuality it is not all that common (Johnson (1998) Neuropsychopharmacology 19:200-205). One study showed that the NDI-like effect in lithium treatment was easily overcome by increasing the levels of arginine vasopressin (AVP) (Carney et al. (1996) Kidney Int 50:377-383). Other studies have suggested that patients with psychiatric disorders display certain defects in renal function without undergoing lithium treatment (Gitlin (1999) Drug Saf 20:231-243).

[0075] Hydralazine, an antihypertensive drug, causes relaxation of arteriolar smooth muscle. Such vasodilation is linked to vigorous stimulation of the sympathetic nervous system, which in turn leads to increased heart rate and contractility, increased plasma renin activity, and fluid retention (Goodman & Gilman's The Pharmacological Basis of Therapeutics 9^{th} ed., p. 794, J. G. Hardman et al., Eds., McGraw Hill, New York, 1996). The increased renin activity leads to an increase in angiotensin II, which in turn causes stimulation of aldosterone and sodium reabsorption.

[0076] Hydralazine is used for the treatment of high blood pressure (hypertension) and for the treatment of pregnant women suffering from high blood pressure (pre-eclampsia or eclampsia). Some common side effects associated with hydralazine use are diarrhea, rapid heartbeat, headache, decreased appetite, and nausea. Hydralazine is often used concomitantly with drugs that inhibit sympathetic activity to combat the mild pulmonary hypertension that can be associated with hydralazine usage.

[0077] In one hydralazine study, rats were fed hydralazine and mineral metabolism was monitored (Peters et al. (1988) Toxicol Lett 41:193-202). Manganese and zinc concentrations were not effected by hydralazine treatment, however tissue iron concentrations were decreased and kidney copper concentrations were increased compared to control groups.

[0078] Another study compared the effects of hydrazine, phenelzine, and hydralazine treatment on rats (Runge-Morris et al. (1996) Drug Metab Dispos 24:734-737). Hydralazine caused an increase in renal GST-alpha subunit expression, although unlike hydrazine and phenelzine it did not alter renal cytochrome P4502E1 expression.

[0079] Colchicine, an alkoloid of Colchicum autumale, is an antiinflammatory agent used in the treatment of gouty arthritis (Goodman & Gilman's The Pharmacological Basis of Therapeutics 9^{th} ed., p. 647, J. G. Hardman et al., Eds., McGraw Hill, New York, 1996).

[0080] An antimitotic agent, colchicine binds to tubulin which leads to depolymerization and disappearance of the fibrillar microtubules in granulocytes and other motile cells. In doing so, the migration of granulocytes into the inflamed area is inhibited. Through a series of events, the inflammatory response is blocked.

[0081] Some common, mild side effects associated with colchicine treatment are loss of appetite and hair loss. More severe side effects that warrant cessation of treatment are nausea, vomiting, diarrhea, and abdominal pain. Colchicine overdose can induce multiorgan failure with a high incidence of mortality. In this setting, renal failure is multifactorial and related to prolonged hypotension, hypoxemia, sepsis, and rhabdomyolysis. In rats, less dramatic doses have been shown to inhibit the secretion of many endogenous proteins such as insulin and parathyroid hormone.

[0082] One study investigated the effects of colchicine on microtubule polymerization status and post-translational modifications of tubulin in rat seminiferous tubules (Correa and Miller (2001) Biol Reprod 64:1644-1652). Colchicine caused extensive microtubule depolymerization, and total tubulin levels decreased twofold after colchicine treatment. The authors also found that colchicine treatment led to a decrease in tyrosination of the microtubule pool of tubulin which was associated with depolymerization of microtubules.

[0083] Sulfadiazine, a sulfonamide, is an antimicrobial agent. It is commonly used concomitantly with pyrimethamine to treat toxoplasmosis, an infection of the brain, in patient suffering from AIDS. These drugs are able to cross the blood-brain barrier and are used at relatively high doses. In addition, sulfadiazine has been shown to be effective at preventing certain types of meningococcal diseases and in treating urinary tract infections.

[0084] Sulfonamides in general are structural analogs of para-aminobenzoic acid (PABA). Because they are competitive antagonists of PABA, sulfonamides are effective against bacteria that are required to utilize PABA for the synthesis of folic acid (Goodman & Gilman's The Pharmacological Basis of Therapeutics 9^{th} ed., p. 1058-1060, J. G. Hardman et al., Eds., McGraw Hill, New York, 1996).

[0085] The main side effects associated with sulfadiazine treatment are fever and skin rashes. Decreases in white blood cells, red blood cells, and platelets, nausea, vomiting, and diarrhea are some other side effects that may result from sulfadiazine treatment. The most troublesome problem with this drug for HIV/AIDS patients is kidney toxicity. These patients tend to use these drugs for extended periods of time, which puts a constant strain on the kidneys. In addition, kidney stones tend to form in the bladder and ureter thereby blocking the flow of urine. Kidney damage may result, and if left untreated kidney failure may occur. Therefore, patients being treated with sulfadiazine are instructed to increase their fluid intake in order to prevent crystal formation in the kidneys.

[0086] One case study examined four HIV-positive patients who had been given sulfadiazine to treat toxoplasmosis (Crespo et al. (2000) Clin Nephrol 54:68-72). All four of the patients, one of whom was a previously healthy person, developed oliguria, abdominal pain, renal failure, and displayed multiple radiolucent renal calculi in echography. Following extensive hydration and alcalinization, the renal function of the patients returned to normal.

[0087] Adriamycin, known generically as doxorubicin, is an anthracycline antibiotic produced by the fungus Streptomyces peucetius. It is an anti-tumor drug used in the treatment of breast, ovarian, bladder, and lung cancers as well as non-Hodgkin's lymphoma, Hodgkin's disease and sarcoma (Goodman & Gilman's The Pharmacological Basis of Therapeutics 9^{th} ed., p. 1264-1265, J. G. Hardman et al., Eds., McGraw Hill, New York, 1996).

[0088] Adriamycin has tetracycline ring structures with the sugar daunosamine attached by glycosidic linkage. It is able to intercalate with DNA, it affects DNA and RNA synthesis, and it can interact with cell membranes and alter their functions. Typically the drug is cell-cycle specific for the S phase of cell division. By binding to the cancer cells' DNA and blocking topoisomerase II, cancer cells are unable to divide and grow.

[0089] Some common side effects associated with adriamycin treatment are fatigue, a drop in white blood cell, red blood cell, or platelet count, hair loss, skin discoloration, and watery eyes (www.cancerhelp.org.uk/help/default.asp?page=4025). More serious side effects include myocardial toxicity, ulceration and necrosis of the colon, and development of a second cancer.

[0090] Because of its utility in fighting cancer, numerous studies have been performed in attempts to further understand the mechanisms and effects of adriamycin. In one study, investigators injected mice with a single dose of adriamycin (Chen et al. (1998) Nephron 78:440-452). The mice exhibited signs of combined glomerular albuminuria and immunoglublinuria, progressively elevated levels of nitrite/nitrate in the urine, abnormal renal function, and other symptoms indicative of focal segmental glomerulosclerosis.

[0091] In another study, rats were given adriamycin and the effects on angiotensin converting enzyme (ACE) were monitored (Venkatesan et al. (1993) Toxicology 85:137-148). The rats developed glomerular and tubular injury, and serum ACE levels were significantly elevated 20, 25, and 30 days post-treatment. A different study followed rabbits for up to one year that were treated with either adriamycin, nephrectomy, or combinations thereof (Gadeholt-Gothlin et al. (1995) Urol Res 23:169-173). The rabbits that were treated with adriamycin exhibited signs of nephrotoxicity at relatively low doses.

[0092] Menadione (vitamin K₃) is a fat-soluble vitamin precursor that is converted into menaquinone in the liver. The primary known function of vitamin K is to assist in normal blood clotting, but it may also play a role in bone calcificaton. Menadione is a quinone compound that induces oxidative stress. It has been used as an anticancer agent and radiosensitizer and can produce toxicity in the kidney, lung, heart, and liver. In the kidney, signs of toxicity are dose-dependent, ranging from minor degranulation of tubular cells at lower doses to tubular dilatation, formation of protein casts in the renal tubules, calcium mineralization, vacuolization in the proximal and distal renal tubules, granular degeneration in the cortex and necrosis and apoptosis (Chiou et al., Toxicology 1997) 124(3):193-202).

[0093] Monocrotaline, an alkaloid obtained from Crotalaria spectabilis, a warm-climate garden plant, induces multi-organ toxicity affecting the kidney, heart, liver and lung. This compound is used to induce mesangiolysis in the kidney, to mimic the effects of Habu venom poisoning and hemolytic-uremic syndrome. Renal lesions in rats first appeared in the glomerular capillaries (endothelial cell detachment and adhesion of platelets to the basal lamina), followed by severe edema in the mesangium. Mesangiolysis subsequently occurred, accompanied by dilatation or obliteration of capillaries and necrosis and hemorrhage in the mesangium (Kurozumi et al., Exp Mol Pathol (1983) 39(3):377-386).

[0094] Vancomycin is a polycyclic glycoprotein antibiotic that is used to treat severe systemic infections by beta-lactam-resistant bacteria, in particular, resistant staphylococci. This drug may be given to patients who are allergic to penicillin. Vancomycin can induce renal failure and interstitial nephritis (Physicians Desk Reference 56th Ed., pp. 1970-1971, Medical Economics Co., Montvale, N.J., 2002).

[0095] Sodium chromate, a model compound used to induce liver toxicity, also produces toxic effects in the kidney. Necrosis of the S1 segment of the proximal tubule has been reported, as well as acute renal failure, characterized by increased levels of kininogens in the renal cortex and medulla and in urine and decreased rates of glomerular filtration (Bompart et al., Nephron (1993) 65(4):612-618; Beckwith-Hall et al, Chem Res Toxicol (1998) 11(4):260-272).

[0096] In the kidney, sodium oxalate forms crystals in the urinary tract, resulting in tubular obstruction, and produces calcific kidney stones in humans and in rats. The stones are located on renal papillary surfaces and consist of an organic matrix and crystals of calcium oxalate and/or calcium phosphate. The matrix is intimately associated with the crystals and contains substances that both promote and inhibit calcification: osteopontin, Tamm-Horsfall protein, bikunin and prothrombin fragment 1. Rats with these stones show decreased urine levels of magnesium and citrate, and the same is believed to occur in humans. Males of both species tend to develop calcium oxalate kidney stones, whereas females tend to form calcium phosphate stones (Khan, World J Urol (1997) 15(4):236-243).

[0097] Hexachloro-1,2-butadiene (HCBD) is a solvent that forms toxic conjugates and metabolites with glutathione, cysteine and N-acetyl cysteine. These then cause damage to the S1, S2 and S3 (pars recta) segments of the proximal tubules in the outer medulla of the kidney. Mitochondrial swelling has been observed in the S1 and S2 segments, although most of the pathological changes occur in the S2 and S3 segments (loss of brush boarder and cellular necrosis in S2, necrosis in S3). In rats, HCBD is about four times more toxic to females than to males (Ishmael et al., Toxicol Pathol (1986) 14(2):258-262; Ishmael et al., J Pathol (1982) 138(2):99-113).

[0098] Chloroform (CHCl₃) is widely used in the manufacture of drugs, cosmetics, plastics and cleaning agents and is a contaminant by-product in chlorinated drinking water. Chloroform was also an early anesthetic used in humans, and, therefore, much is known regarding its toxicity. Exposure can induce liver and kidney damage and cardiac arrthymias.

[0099] Toxic levels of exposure in rodents are carcinogenic due to the chronic cycle of cell injury and repair that is induced, rather than because of direct genotoxic action. The injury to the liver and kidney are thought to occur by two different mechanisms related to its metabolism in the target organ. Studies have shown that the extent of liver and kidney damage and necrosis relates multiple factors including sex, strain, route of exposure and the vehicle used. In the kidney, biotransformation of chloroform by cytochrome P450 produces reactive intermediates, which damage mainly the renal proximal tubules. Typical signs of nephrotoxicity include proteinuria, glucosuria and increased BUN levels (Casarett & Doull's Toxicology: The Basic Science of Poisons 6th Ed., Klaasen, ed., Chap. 14, pp. 503-508, McGraw-Hill, New York, 2001; Smith et al., Toxicol Appl Pharmacol 70:467-479, 1983).

[0100] Diclofenac, a non-steroidal anti-inflammatory drug, is commonly administered to patients suffering from rheumatoid arthritis, osteoarthritis, and ankylosing spondylitis. Following oral administration, diclofenac is rapidly absorbed and then metabolized in the liver by cytochrome P450 isozyme of the CYC2C subfamily (Goodman & Gilman's The Pharmacological Basis of Therapeutics 9^{th} Ed., Hardman et al., eds., p. 637, McGraw Hill, New York, 1996). In addition, diclofenac is used topically to treat pain due to corneal damage (Jayamanne et al., Eye 11(Pt. 1):79-83, 1997; Dornic et al., Am J. Ophthalmol 125(5):719-721, 1998).

[0101] Metabolism of diclofenac in kidney tissue produces reactive oxygen species that can cause severe oxidative stress and genomic DNA fragmentation. Examination of diverse types of kidney cells for nuclei with apoptotic characteristics showed that such nuclei are found in the linings of the renal proximal and distal tubules. Additional toxic effects include elevated levels of BUN, malondialdehyde (MDA), SOD, and activated Ca²⁺—Mg²⁺-endonuclease (Hickey et al., Free Radic Biol Med (2001) 31(2):139-152).

[0102] Thioacetamide's only significant commercial use is as a replacement for hydrogen sulfide in qualitative analyses (IARC, Vol. 7, 1974). It has also been used as an organic solvent in the leather, textile and paper industries, as an accelerator in the vulcanization of buna rubber, and as a stabilizer of motor fuel. The primary routes of human exposure are inhalation and skin contact with products in which thioacetamide was used as a solvent (9th Report on Carcinogens, U.S. Dept. of Health and Human Services, Public Health Service, National Toxicology Program, http://ehp.niehs.nih.gov/roc/toc9.html).

[0103] In exposed rats, thioacetamide was shown to accumulate in the liver and kidney, resulting in elevated levels of serum total bilirubin, aspartate aminotransferase, alanine aminotransferase, BUN, creatinine and TNFα. Impaired clearance of the toxin and increased secretion of TNFα are related to the progression of toxic effects in the liver and kidney (Nakatani et al., Liver (2001) 21(1):64-70). Additional histological changes in kidney tissue include glomerular tuft collapse and interstitial haemorrhage (Caballero et al., Gut (2001) 48(1):34-40).

[0104] Toxicity Prediction and Modeling

[0105] The genes and gene expression information, gene expression profiles, as well as the portfolios and subsets of the genes provided in Tables 1-5, may be used to predict at least one toxic effect, including the nephrotoxicity of a test or unknown compound. As used, herein, at least one toxic effect includes, but is not limited to, a detrimental change in the physiological status of a cell or organism. The response may be, but is not required to be, associated with a particular pathology, such as tissue necrosis. Accordingly, the toxic effect includes effects at the molecular and cellular level. Nephrotoxicity is an effect as used herein and includes but is not limited to the pathologies of nephritis, tubular toxicity, kidney necrosis, glomerular and tubular injury, and focal segmental glomerulosclerosis. As used herein, a gene expression profile comprises any quantitative representation of the expression of at least one mRNA species in a cell sample or population and includes profiles made by various methods such as differential display, PCR, microarray and other hybridization analysis, etc.

[0106] In general, assays to predict the toxicity or nephrotoxicity of a test agent (or compound or multi-component composition) comprise the steps of exposing a cell population to the test compound, assaying or measuring the level of relative or absolute gene expression of one or more of the genes in Tables 1-5 and comparing the identified expression level(s) to the expression levels disclosed in the Tables and database(s) disclosed herein. Assays may include the measurement of the expression levels of about 2, 3, 4, 5, 6, 7, 8, 9, 10, 15, 20, 25, 30, 50, 75, 100 or more genes from Tables 1-5.

[0107] In the methods of the invention, the gene expression level for a gene or genes induced by the test agent, compound or compositions may be comparable to the levels found in the Tables or databases disclosed herein if the expression level varies within a factor of about 2, about 1.5 or about 1.0 fold. In some cases, the expression levels are comparable if the agent induces a change in the expression of a gene in the same direction (e.g., up or down) as a reference toxin.

[0108] The cell population that is exposed to the test agent, compound or composition may be exposed in vitro or in vivo. For instance, cultured or freshly isolated renal cells, in particular rat renal cells, may be exposed to the agent under standard laboratory and cell culture conditions. In another assay format, in vivo exposure may be accomplished by administration of the agent to a living animal, for instance a laboratory rat.

[0109] Procedures for designing and conducting toxicity tests in in vitro and in vivo systems are well known, and are described in many texts on the subject, such as Loomis et al., Loomis's Esstentials of Toxicology, 4th Ed., Academic Press, New York, 1996; Echobichon, The Basics of Toxicity Testing, CRC Press, Boca Raton, 1992; Frazier, editor, In Vitro Toxicity Testing, Marcel Dekker, New York, 1992; and the like.

[0110] In in vitro toxicity testing, two groups of test organisms are usually employed: One group serves as a control and the other group receives the test compound in a single dose (for acute toxicity tests) or a regimen of doses (for prolonged or chronic toxicity tests). Because, in some cases, the extraction of tissue as called for in the methods of the invention requires sacrificing the test animal, both the control group and the group receiving compound must be large enough to permit removal of animals for sampling tissues, if it is desired to observe the dynamics of gene expression through the duration of an experiment.

[0111] In setting up a toxicity study, extensive guidance is provided in the literature for selecting the appropriate test organism for the compound being tested, route of administration. dose ranges, and the like. Water or physiological saline (0.9% NaCl in water) is the solute of choice for the test compound since these solvents permit administration by a variety of routes. When this is not possible because of solubility limitations, vegetable oils such as corn oil or organic solvents such as propylene glycol may be used.

[0112] Regardless of the route of administration, the volume required to administer a given dose is limited by the size of the animal that is used. It is desirable to keep the volume of each dose uniform within and between groups of animals. When rats or mice are used, the volume administered by the oral route generally should not exceed about 0.005 ml per gram of animal. Even when aqueous or physiological saline solutions are used for parenteral injection the volumes that are tolerated are limited, although such solutions are ordinarily thought of as being innocuous. The intravenous LD₅₀ of distilled water in the mouse is approximately 0.044 ml per gram and that of isotonic saline is 0.068 ml per gram of mouse. In some instances, the route of administration to the test animal should be the same as, or as similar as possible to, the route of administration of the compound to man for therapeutic purposes.

[0113] When a compound is to be administered by inhalation, special techniques for, generating test atmospheres are necessary. The methods usually involve aerosolization or nebulization of fluids containing the compound. If the agent to be tested is a fluid that has an appreciable vapor pressure, it may be administered by passing air through the solution under controlled temperature conditions. Under these conditions, dose is estimated from the volume of air inhaled per unit time, the temperature of the solution, and the vapor pressure of the agent involved. Gases are metered from reservoirs. When particles of a solution are to be administered, unless the particle size is less than about 2 μm the particles will not reach the terminal alveolar sacs in the lungs. A variety of apparatuses and chambers are available to perform studies for detecting effects of irritant or other toxic endpoints when they are administered by inhalation. The preferred method of administering an agent to animals is via the oral route, either by intubation or by incorporating the agent in the feed.

[0114] When the agent is exposed to cells in vitro or in cell culture, the cell population to be exposed to the agent may be divided into two or more subpopulations, for instance, by dividing the population into two or more identical aliquots. In some preferred embodiments of the methods of the invention, the cells to be exposed to the agent are derived from kidney tissue. For instance, cultured or freshly isolated rat renal cells may be used.

[0115] The methods of the invention may be used generally to predict at least one toxic response, and, as described in the Examples, may be used to predict the likelihood that a compound or test agent will induce various specific kidney pathologies, such as nephritis, kidney necrosis, glomerular and tubular injury, focal segmental glomerulosclerosis, or other pathologies associated with at least one of the toxins herein described. The methods of the invention may also be used to determine the similarity of a toxic response to one or more individual compounds. In addition, the methods of the invention may be used to predict or elucidate the potential cellular pathways influenced, induced or modulated by the compound or test agent due to the similarity of the expression profile compared to the profile induced by a known toxin (see Tables 5-5L).

[0116] Diagnostic Uses for the Toxicity Markers

[0117] As described above, the genes and gene expression information or portfolios of the genes with their expression information as provided in Tables 1-5 may be used as diagnostic markers for the prediction or identification of the physiological state of tissue or cell sample that has been exposed to a compound or to identify or predict the toxic effects of a compound or agent. For instance, a tissue sample such as a sample of peripheral blood cells or some other easily obtainable tissue sample may be assayed by any of the methods described above, and the expression levels from a gene or genes from Tables 1-5 may be compared to the expression levels found in tissues or cells exposed to the toxins described herein. These methods may result in the diagnosis of a physiological state in the cell or may be used to identify the potential toxicity of a compound, for instance a new or unknown compound or agent. The comparison of expression data, as well as available sequence or other information may be done by researcher or diagnostician or may be done with the aid of a computer and databases as described below.

[0118] In another format, the levels of a gene(s) of Tables 1-5, its encoded protein(s), or any metabolite produced by the encoded protein may be monitored or detected in a sample, such as a bodily tissue or fluid sample to identify or diagnose a physiological state of an organism. Such samples may include any tissue or fluid sample, including urine, blood and easily obtainable cells such as peripheral lymphocytes.

[0119] Use of the Markers for Monitoring Toxicity Progression

[0120] As described above, the genes and gene expression information provided in Tables 1-5 may also be used as markers for the monitoring of toxicity progression, such as that found after initial exposure to a drug, drug candidate, toxin, pollutant, etc. For instance, a tissue or cell sample may be assayed by any of the methods described above, and the expression levels from a gene or genes from Tables 1-5 may be compared to the expression levels found in tissue or cells exposed to the renal toxins described herein. The comparison of the expression data, as well as available sequence or other information may be done by a researcher or diagnostician or may be done with the aid of a computer and databases.

[0121] Use of the Toxicity Markers for Drug Screening

[0122] According to the present invention, the genes identified in Tables 1-5 may be used as markers or drug targets to evaluate the effects of a candidate drug, chemical compound or other agent on a cell or tissue sample. The genes may also be used as drug targets to screen for agents that modulate their expression and/or activity. In various formats, a candidate drug or agent can be screened for the ability to stimulate the transcription or expression of a given marker or markers or to down-regulate or counteract the transcription or expression of a marker or markers. According to the present invention, one can also compare the specificity of a drug's effects by looking at the number of markers which the drug induces and comparing them. More specific drugs will have less transcriptional targets. Similar sets of markers identified for two drugs may indicate a similarity of effects.

[0123] Assays to monitor the expression of a marker or markers as defined in Tables 1-5 may utilize any available means of monitoring for changes in the expression level of the nucleic acids of the invention. As used herein, an agent is said to modulate the expression of a nucleic acid of the invention if it is capable of up- or down-regulating expression of the nucleic acid in a cell.

[0124] In one assay format, gene chips containing probes to one, two or more genes from Tables 1-5 may be used to directly monitor or detect changes in gene expression in the treated or exposed cell. Cell lines, tissues or other samples are first exposed to a test agent and in some instances, a known toxin, and the detected expression levels of one or more, or preferably 2 or more of the genes of Tables 1-5 are compared to the expression levels of those same genes exposed to a known toxin alone. Compounds that modulate the expression patterns of the known toxin(s) would be expected to modulate potential toxic physiological effects in vivo. The genes in Tables 1-5 are particularly appropriate markers in these assays as they are differentially expressed in cells upon exposure to a known renal toxin. Tables 1 and 2 disclose those genes that are differentially expressed upon exposure to the named toxins and their corresponding GenBank Accession numbers. Table 3 discloses the human homologues and the corresponding GenBank Accession numbers of the differentially expressed genes of Tables 1 and 2.

[0125] In another format, cell lines that contain reporter gene fusions between the open reading frame and/or the transcriptional regulatory regions of a gene in Tables 1-5 and any assayable fusion partner may be prepared. Numerous assayable fusion partners are known and readily available including the firefly luciferase gene and the gene encoding chloramphenicol acetyltransferase (Alam et al. (1990), Anal Biochem 188:245-254). Cell lines containing the reporter gene fusions are then exposed to the agent to be tested under appropriate conditions and time. Differential expression of the reporter gene between samples exposed to the agent and control samples identifies agents which modulate the expression of the nucleic acid.

[0126] Additional assay formats may be used to monitor the ability of the agent to modulate the expression of a gene identified in Tables 1-5. For instance, as described above, mRNA expression may be monitored directly by hybridization of probes to the nucleic acids of the invention. Cell lines are exposed to the agent to be tested under appropriate conditions and time, and total RNA or mRNA is isolated by standard procedures such those disclosed in Sambrook et al. (Molecular Cloning: A Laboratory Manual, 2nd Ed., Cold Spring Harbor Laboratory Press, Cold Spring Harbor, N.Y., 1989).

[0127] In another assay format, cells or cell lines are first identified which express the gene products of the invention physiologically. Cells and/or cell lines so identified would be expected to comprise the necessary cellular machinery such that the fidelity of modulation of the transcriptional apparatus is maintained with regard to exogenous contact of agent with appropriate surface transduction mechanisms and/or the cytosolic cascades. Further, such cells or cell lines may be transduced or transfected with an expression vehicle (e.g., a plasmid or viral vector) construct comprising an operable non-translated 5′-promoter containing end of the structural gene encoding the gene products of Tables 1-5 fused to one or more antigenic fragments or other detectable markers, which are peculiar to the instant gene products, wherein said fragments are under the transcriptional control of said promoter and are expressed as polypeptides whose molecular weight can be distinguished from the naturally occurring polypeptides or may further comprise an immunologically distinct or other detectable tag. Such a process is well known in the art (see Sambrook et al., supra).

[0128] Cells or cell lines transduced or transfected as outlined above are then contacted with agents under appropriate conditions; for example, the agent comprises a pharmaceutically acceptable excipient and is contacted with cells comprised in an aqueous physiological buffer such as phosphate buffered saline (PBS) at physiological pH, Eagles balanced salt solution (BSS) at physiological pH, PBS or BSS comprising serum or conditioned media comprising PBS or BSS and/or serum incubated at 37° C. Said conditions may be modulated as deemed necessary by one of skill in the art. Subsequent to contacting the cells with the agent, said cells are disrupted and the polypeptides of the lysate are fractionated such that a polypeptide fraction is pooled and contacted with an antibody to be further processed by immunological assay (e.g., ELISA, immunoprecipitation or Western blot). The pool of proteins isolated from the agent-contacted sample is then compared with the control samples (no exposure and exposure to a known toxin) where only the excipient is contacted with the cells and an increase or decrease in the immunologically generated signal from the agent-contacted sample compared to the control is used to distinguish the effectiveness and/or toxic effects of the agent.

[0129] Another embodiment of the present invention provides methods for identifying agents that modulate at least one activity of a protein(s) encoded by the genes in Tables 1-5. Such methods or assays may utilize any means of monitoring or detecting the desired activity.

[0130] In one format, the relative amounts of a protein (Tables 1-5) between a cell population that has been exposed to the agent to be tested compared to an un-exposed control cell population and a cell population exposed to a known toxin may be assayed. In this format, probes such as specific antibodies are used to monitor the differential expression of the protein in the different cell populations. Cell lines or populations are exposed to the agent to be tested under appropriate conditions and time. Cellular lysates may be prepared from the exposed cell line or population and a control, unexposed cell line or population. The cellular lysates are then analyzed with the probe, such as a specific antibody.

[0131] Agents that are assayed in the above methods can be randomly selected or rationally selected or designed. As used herein, an agent is said to be randomly selected when the agent is chosen randomly without considering the specific sequences involved in the association of a protein of the invention alone or with its associated substrates, binding partners, etc. An example of randomly selected agents is the use a chemical library or a peptide combinatorial library, or a growth broth of an organism.

[0132] As used herein, an agent is said to be rationally selected or designed when the agent is chosen on a nonrandom basis which takes into account the sequence of the target site and/or its conformation in connection with the agent's action. Agents can be rationally selected or rationally designed by utilizing the peptide sequences that make up these sites. For example, a rationally selected peptide agent can be a peptide whose amino acid sequence is identical to or a derivative of any functional consensus site.

[0133] The agents of the present invention can be, as examples, peptides, small molecules, vitamin derivatives, as well as carbohydrates. Dominant negative proteins, DNAs encoding these proteins, antibodies to these proteins, peptide fragments of these proteins or mimics of these proteins may be introduced into cells to affect function. “Mimic” used herein refers to the modification of a region or several regions of a peptide molecule to provide a structure chemically different from the parent peptide but topographically and functionally similar to the parent peptide (see G. A. Grant in: Molecular Biology and Biotechnology, Meyers, ed., pp. 659-664, VCH Publishers, New York, 1995). A skilled artisan can readily recognize that there is no limit as to the structural nature of the agents of the present invention.

[0134] Nucleic Acid Assay Formats

[0135] The genes identified as being differentially expressed upon exposure to a known renal toxin (Tables 1-5) may be used in a variety of nucleic acid detection assays to detect or quantify the expression level of a gene or multiple genes in a given sample. The genes described in Tables 1-5 may also be used in combination with one or more additional genes whose differential expression is associate with toxicity in a cell or tissue. In preferred embodiments, the genes in Tables 1-5 may be combined with one or more of the genes described in prior and related application Ser. Nos. 10/152,319, filed May 22, 2002; 60/292,335, filed May 22, 2001; 60/297,523, filed Jun. 13, 2001; 60/298,925, filed Jun. 19, 2001; 60/303,810, filed Jul. 10, 2001; 60/303,807, filed Jul. 10, 2001; 60/303,808, filed Jul. 10, 2001; 60/315,047, filed Aug. 28, 2001; 60/324,928, filed Sep. 27, 2001; 60/330,867, filed Nov. 1, 2001; 60/330,462, filed Oct. 22, 2001; 60/331,805, filed Nov. 21, 2001; 60/336,144, filed Dec. 6, 2001; 60/340,873, filed Dec. 19, 2001; 60/357,843, filed Feb. 21, 2002; 60/357,842, filed Feb. 21, 2002; 60/357,844, filed Feb. 21, 2002; 60/364,134; 60/370,206 filed Mar. 15, 2002, filed Apr. 8, 2002; 60/370,247, filed Apr. 8, 2002; 60/370,144, filed Apr. 8, 2002; 60/371,679, filed Apr. 12, 2002; and 60/372,794, filed Apr. 17, 2002, all of which are incorporated by reference on page 1 of this application.

[0136] Any assay format to detect gene expression may be used. For example, traditional Northern blotting, dot or slot blot, nuclease protection, primer directed amplification, RT-PCR, semi- or quantitative PCR, branched-chain DNA and differential display methods may be used for detecting gene expression levels. Those methods are useful for some embodiments of the invention. In cases where smaller numbers of genes are detected, amplification based assays may be most efficient. Methods and assays of the invention, however, may be most efficiently designed with hybridization-based methods for detecting the expression of a large number of genes.

[0137] Any hybridization assay format may be used, including solution-based and solid support-based assay formats. Solid supports containing oligonucleotide probes for differentially expressed genes of the invention can be filters, polyvinyl chloride dishes, particles, beads, microparticles or silicon or glass based chips, etc. Such chips, wafers and hybridization methods are widely available, for example, those disclosed by Beattie (WO 95/11755).

[0138] Any solid surface to which oligonucleotides can be bound, either directly or indirectly, either covalently or non-covalently, can be used. A preferred solid support is a high density array or DNA chip. These contain a particular oligonucleotide probe in a predetermined location on the array. Each predetermined location may contain more than one molecule of the probe, but each molecule within the predetermined location has an identical sequence. Such predetermined locations are termed features. There may be, for example, from 2, 10, 100, 1000 to 10,000, 100,000 or 400,000 or more of such features on a single solid support. The solid support, or the area within which the probes are attached may be on the order of about a square centimeter. Probes corresponding to the genes of Tables 1-5 or from the related applications described above may be attached to single or multiple solid support structures, e.g., the probes may be attached to a single chip or to multiple chips to comprise a chip set.

[0139] Oligonucleotide probe arrays for expression monitoring can be made and used according to any techniques known in the art (see for example, Lockhart et al (1996), Nat Biotechnol 14:1675-1680; McGall et al. (1996), Proc Nat Acad Sci USA 93: 13555-13460). Such probe arrays may contain at least two or more oligonucleotides that are complementary to or hybridize to two or more of the genes described in Tables 1-5. For instance, such arrays may contain oligonucleotides that are complementary to or hybridize to at least 2, 3, 4, 5, 6, 7, 8, 9, 10, 20, 30, 50, 70, 100 or more of the genes described herein. Preferred arrays contain all or nearly all of the genes listed in Tables 1-5, or individually, the gene sets of Tables 5-5L. In a preferred embodiment, arrays are constructed that contain oligonucleotides to detect all or nearly all of the genes in any one of or all of Tables 1-5 on a single solid support substrate, such as a chip.

[0140] The sequences of the expression marker genes of Tables 1-5 are in the public databases. Table 1 provides the GenBank Accession Number or NCBI RefSeq ID for each of the sequences (see www.ncbi.nlm.nih.gov/), as well as the title for the cluster of which gene is part. Table 2 lists the metabolic pathways in which each listed gene functions, while Table 3 provides the gene names and cluster titles for the human homologues of the genes described in Tables 1 and 2. The sequences of the genes in GenBank and/or RefSeq are expressly herein incorporated by reference in their entirety as of the filing date of this application, as are related sequences, for instance, sequences from the same gene of different lengths, variant sequences, polymorphic sequences, genomic sequences of the genes and related sequences from different species, including the human counterparts, where appropriate. These sequences may be used in the methods of the invention or may be used to produce the probes and arrays of the invention. In some embodiments, the genes in Tables 1-5 that correspond to the genes or fragments previously associated with a toxic response may be excluded from the Tables. Table 4 provides the key to the model codes used in Tables 3 and 5-5L, where each model represents a toxin treatment or a set of pathological effects (disease state) resulting from a toxin treatment. In Tables 5A-5L, the genes that are differentially expressed, i.e., up- or down-regulated, in response to a toxin treatment or in a particular disease state are listed. The expression levels of these genes in samples in which a toxic response was found and in samples in which a toxic response was not found are also indicated. The general table (Table 5) is a summation of the data in Tables 5A-5L.

[0141] As described above, in addition to the sequences of the GenBank Accession Numbers or NCBI RefSeq ID's disclosed in the Tables 1-5, sequences such as naturally occurring variants or polymorphic sequences may be used in the methods and compositions of the invention. For instance, expression levels of various allelic or homologous forms of a gene disclosed in Tables 1-5 may be assayed, including homologs from species other than rat. Any and all nucleotide variations that do not alter the functional activity of a gene listed in the Tables 1-5, including all naturally occurring allelic variants of the genes herein disclosed, may be used in the methods and to make the compositions (e.g., arrays) of the invention.

[0142] Probes based on the sequences of the genes described above may be prepared by any commonly available method. Oligonucleotide probes for screening or assaying a tissue or cell sample are preferably of sufficient length to specifically hybridize only to appropriate, complementary genes or transcripts. Typically the oligonucleotide probes will be at least about 10, 12, 14, 16, 18, 20 or 25 nucleotides in length. In some cases, longer probes of at least 30, 40, or 50 nucleotides will be desirable.

[0143] As used herein, oligonucleotide sequences that are complementary to one or more of the genes described in Tables 1-5 refer to oligonucleotides that are capable of hybridizing under stringent conditions to at least part of the nucleotide sequences of said genes. Such hybridizable oligonucleotides will typically exhibit at least about 75% sequence identity at the nucleotide level to said genes, preferably about 80% or 85% sequence identity or more preferably about 90% or 95% or more sequence identity to said genes.

[0144] “Bind(s) substantially” refers to complementary hybridization between a probe nucleic acid and a target nucleic acid and embraces minor mismatches that can be accommodated by reducing the stringency of the hybridization media to achieve the desired detection of the target polynucleotide sequence.

[0145] The terms “background” or “background signal intensity” refer to hybridization signals resulting from non-specific binding, or other interactions, between the labeled target nucleic acids and components of the oligonucleotide array (e.g., the oligonucleotide probes, control probes, the array substrate, etc.). Background signals may also be produced by intrinsic fluorescence of the array components themselves. A single background signal can be calculated for the entire array, or a different background signal may be calculated for each target nucleic acid. In a preferred embodiment, background is calculated as the average hybridization signal intensity for the lowest 5% to 10% of the probes in the array, or, where a different background signal is calculated for each target gene, for the lowest 5% to 10% of the probes for each gene. Of course, one of skill in the art will appreciate that where the probes to a particular gene hybridize well and thus appear to be specifically binding to a target sequence, they should not be used in a background signal calculation. Alternatively, background may be calculated as the average hybridization signal intensity produced by hybridization to probes that are not complementary to any sequence found in the sample (e.g. probes directed to nucleic acids of the opposite sense or to genes not found in the sample such as bacterial genes where the sample is mammalian nucleic acids). Background can also be calculated as the average signal intensity produced by regions of the array that lack any probes at all.

[0146] The phrase “hybridizing specifically to” or “specifically hybridizes” refers to the binding, duplexing, or hybridizing of a molecule substantially to or only to a particular nucleotide sequence or sequences under stringent conditions when that sequence is present in a complex mixture (e.g., total cellular) DNA or RNA.

[0147] Assays and methods of the invention may utilize available formats to simultaneously screen at least about 100, preferably about 1000, more preferably about 10,000 and most preferably about 1,000,000 different nucleic acid hybridizations.

[0148] As used herein a “probe” is defined as a nucleic acid, capable of binding to a target nucleic acid of complementary sequence through one or more types of chemical bonds, usually through complementary base pairing, usually through hydrogen bond formation. As used herein, a probe may include natural (i.e., A, G, U, C, or T) or modified bases (7-deazaguanosine, inosine, etc.). In addition, the bases in probes may be joined by a linkage other than a phosphodiester bond, so long as it does not interfere with hybridization. Thus, probes may be peptide nucleic acids in which the constituent bases are joined by peptide bonds rather than phosphodiester linkages.

[0149] The term “perfect match probe” refers to a probe that has a sequence that is perfectly complementary to a particular target sequence. The test probe is typically perfectly complementary to a portion (subsequence) of the target sequence. The perfect match (PM) probe can be a “test probe”, a “normalization control” probe, an expression level control probe and the like. A perfect match control or perfect match probe is, however, distinguished from a “mismatch control” or “mismatch probe.”

[0150] The terms “mismatch control” or “mismatch probe” refer to a probe whose sequence is deliberately selected not to be perfectly complementary to a particular target sequence. For each mismatch (MM) control in a high-density array there typically exists a corresponding perfect match (PM) probe that is perfectly complementary to the same particular target sequence. The mismatch may comprise one or more bases.

[0151] While the mismatch(es) may be located anywhere in the mismatch probe, terminal mismatches are less desirable as a terminal mismatch is less likely to prevent hybridization of the target sequence. In a particularly preferred embodiment, the mismatch is located at or near the center of the probe such that the mismatch is most likely to destabilize the duplex with the target sequence under the test hybridization conditions.

[0152] The term “stringent conditions” refers to conditions under which a probe will hybridize to its target subsequence, but with only insubstantial hybridization to other sequences or to other sequences such that the difference may be identified. Stringent conditions are sequence-dependent and will be different in different circumstances. Longer sequences hybridize specifically at higher temperatures. Generally, stringent conditions are selected to be about 5° C. lower than the thermal melting point (Tm) for the specific sequence at a defined ionic strength and pH.

[0153] Typically, stringent conditions will be those in which the salt concentration is at least about 0.01 to 1.0 M Na⁺ ion concentration (or other salts) at pH 7.0 to 8.3 and the temperature is at least about 30° C. for short probes (e.g., 10 to 50 nucleotides). Stringent conditions may also be achieved with the addition of destabilizing agents such as formamide.

[0154] The “percentage of sequence identity” or “sequence identity” is determined by comparing two optimally aligned sequences or subsequences over a comparison window or span, wherein the portion of the polynucleotide sequence in the comparison window may optionally comprise additions or deletions (i.e., gaps) as compared to the reference sequence (which does not comprise additions or deletions) for optimal alignment of the two sequences. The percentage is calculated by determining the number of positions at which the identical submit (e.g. nucleic acid base or amino acid residue) occurs in both sequences to yield the number of matched positions, dividing the number of matched positions by the total number of positions in the window of comparison and multiplying the result by 100 to yield the percentage of sequence identity. Percentage sequence identity when calculated using the programs GAP or BESTFIT (see below) is calculated using default gap weights.

[0155] Probe Design

[0156] One of skill in the art will appreciate that an enormous number of array designs are suitable for the practice of this invention. The high density array will typically include a number of test probes that specifically hybridize to the sequences of interest. Probes may be produced from any region of the genes identified in the Tables and the attached representative sequence listing. In instances where the gene reference in the Tables is an EST, probes may be designed from that sequence or from other regions of the corresponding full-length transcript that may be available in any of the sequence databases, such as those herein described. See WO 99/32660 for methods of producing probes for a given gene or genes. In addition, any available software may be used to produce specific probe sequences, including, for instance, software available from Molecular Biology Insights, Olympus Optical Co. and Biosoft International. In a preferred embodiment, the array will also include one or more control probes.

[0157] High density array chips of the invention include “test probes.” Test probes may be oligonucleotides that range from about 5 to about 500, or about 7 to about 50 nucleotides, more preferably from about 10 to about 40 nucleotides and most preferably from about 15 to about 35 nucleotides in length. In other particularly preferred embodiments, the probes are 20 or 25 nucleotides in length. In another preferred embodiment, test probes are double or single strand DNA sequences such as cDNA fragments. DNA sequences are isolated or cloned from natural sources or amplified from natural sources using native nucleic acid as templates. These probes have sequences complementary to particular subsequences of the genes whose expression they are designed to detect. Thus, the test probes are capable of specifically hybridizing to the target nucleic acid they are to detect.

[0158] In addition to test probes that bind the target nucleic acid(s) of interest, the high density array can contain a number of control probes. The control probes may fall into three categories referred to herein as 1) normalization controls; 2) expression level controls; and 3) mismatch controls.

[0159] Normalization controls are oligonucleotide or other nucleic acid probes that are complementary to labeled reference oligonucleotides or other nucleic acid sequences that are added to the nucleic acid sample to be screened. The signals obtained from the normalization controls after hybridization provide a control for variations in hybridization conditions, label intensity, “reading” efficiency and other factors that may cause the signal of a perfect hybridization to vary between arrays. In a preferred embodiment, signals (e.g., fluorescence intensity) read from all other probes in the array are divided by the signal (e.g., fluorescence intensity) from the control probes thereby normalizing the measurements.

[0160] Virtually any probe may serve as a normalization control. However, it is recognized that hybridization efficiency varies with base composition and probe length. Preferred normalization probes are selected to reflect the average length of the other probes present in the array, however, they can be selected to cover a range of lengths. The normalization control(s) can also be selected to reflect the (average) base composition of the other probes in the array, however in a preferred embodiment, only one or a few probes are used and they are selected such that they hybridize well (i.e., no secondary structure) and do not match any target-specific probes.

[0161] Expression level controls are probes that hybridize specifically with constitutively expressed genes in the biological sample. Virtually any constitutively expressed gene provides a suitable target for expression level controls. Typically expression level control probes have sequences complementary to subsequences of constitutively expressed “housekeeping genes” including, but not limited to the actin gene, the transferrin receptor gene, the GAPDH gene, and the like.

[0162] Mismatch controls may also be provided for the probes to the target genes, for expression level controls or for normalization controls. Mismatch controls are oligonucleotide probes or other nucleic acid probes identical to their corresponding test or control probes except for the presence of one or more mismatched bases. A mismatched base is a base selected so that it is not complementary to the corresponding base in the target sequence to which the probe would otherwise specifically hybridize. One or more mismatches are selected such that under appropriate hybridization conditions (e.g., stringent conditions) the test or control probe would be expected to hybridize with its target sequence, but the mismatch probe would not hybridize (or would hybridize to a significantly lesser extent). Preferred mismatch probes contain a central mismatch. Thus, for example, where a probe is a 20 mer, a corresponding mismatch probe will have the identical sequence except for a single base mismatch (e.g., substituting a G, a C or a T for an A) at any of positions 6 through 14 (the central mismatch).

[0163] Mismatch probes thus provide a control for non-specific binding or cross hybridization to a nucleic acid in the sample other than the target to which the probe is directed. For example, if the target is present the perfect match probes should be consistently brighter than the mismatch probes. In addition, if all central mismatches are present, the mismatch probes can be used to detect a mutation, for instance, a mutation of a gene in the accompanying Tables 1-5. The difference in intensity between the perfect match and the mismatch probe provides a good measure of the concentration of the hybridized material.

[0164] Nucleic Acid Samples

[0165] Cell or tissue samples may be exposed to the test agent in vitro or in vivo. When cultured cells or tissues are used, appropriate mammalian cell extracts, such as liver extracts, may also be added with the test agent to evaluate agents that may require biotransformation to exhibit toxicity. In a preferred format, primary isolates or cultured cell lines of animal or human renal cells may be used.

[0166] The genes which are assayed according to the present invention are typically in the form of mRNA or reverse transcribed mRNA. The genes may or may not be cloned. The genes may or may not be amplified. The cloning and/or amplification do not appear to bias the representation of genes within a population. In some assays, it may be preferable, however, to use polyA+ RNA as a source, as it can be used with less processing steps.

[0167] As is apparent to one of ordinary skill in the art, nucleic acid samples used in the methods and assays of the invention may be prepared by any available method or process. Methods of isolating total mRNA are well known to those of skill in the art. For example, methods of isolation and purification of nucleic acids are described in detail in Chapter 3 of Laboratory Techniques in Biochemistry and Molecular Biology Vol. 24, Hybridization With Nucleic Acid Probes: Theory and Nucleic Acid Probes, P. Tijssen, Ed., Elsevier Press, New York, 1993. Such samples include RNA samples, but also include cDNA synthesized from a mRNA sample isolated from a cell or tissue of interest. Such samples also include DNA amplified from the cDNA, and RNA transcribed from the amplified DNA. One of skill in the art would appreciate that it is desirable to inhibit or destroy RNase present in homogenates before homogenates are used.

[0168] Biological samples may be of any biological tissue or fluid or cells from any organism as well as cells raised in vitro, such as cell lines and tissue culture cells. Frequently the sample will be a tissue or cell sample that has been exposed to a compound, agent, drug, pharmaceutical composition, potential environmental pollutant or other composition. In some formats, the sample will be a “clinical sample” which is a sample derived from a patient. Typical clinical samples include, but are not limited to, sputum, blood, blood-cells (e.g., white cells), tissue or fine needle biopsy samples, urine, peritoneal fluid, and pleural fluid, or cells therefrom. Biological samples may also include sections of tissues, such as frozen sections or formalin fixed sections taken for histological purposes.

[0169] Forming High Density Arrays

[0170] Methods of forming high density arrays of oligonucleotides with a minimal number of synthetic steps are known. The oligonucleotide analogue array can be synthesized on a single or on multiple solid substrates by a variety of methods, including, but not limited to, light-directed chemical coupling, and mechanically directed coupling (see Pirrung, U.S. Pat. No. 5,143,854).

[0171] In brief, the light-directed combinatorial synthesis of oligonucleotide arrays on a glass surface proceeds using automated phosphoramidite chemistry and chip masking techniques. In one specific implementation, a glass surface is derivatized with a silane reagent containing a functional group, e.g., a hydroxyl or amine group blocked by a photolabile protecting group. Photolysis through a photolithographic mask is used selectively to expose functional groups which are then ready to react with incoming 5′ photoprotected nucleoside phosphoramidites. The phosphoramidites react only with those sites which are illuminated (and thus exposed by removal of the photolabile blocking group). Thus, the phosphoramidites only add to those areas selectively exposed from the preceding step. These steps are repeated until the desired array of sequences have been synthesized on the solid surface. Combinatorial synthesis of different oligonucleotide analogues at different locations on the array is determined by the pattern of illumination during synthesis and the order of addition of coupling reagents.

[0172] In addition to the foregoing, additional methods which can be used to generate an array of oligonucleotides on a single substrate are described in PCT Publication Nos. WO 93/09668 and WO 01/23614. High density nucleic acid arrays can also be fabricated by depositing pre-made or natural nucleic acids in predetermined positions. Synthesized or natural nucleic acids are deposited on specific locations of a substrate by light directed targeting and oligonucleotide directed targeting. Another embodiment uses a dispenser that moves from region to region to deposit nucleic acids in specific spots.

[0173] Hybridization

[0174] Nucleic acid hybridization simply involves contacting a probe and target nucleic acid under conditions where the probe and its complementary target can form stable hybrid duplexes through complementary base pairing. See WO 99/32660. The nucleic acids that do not form hybrid duplexes are then washed away leaving the hybridized nucleic acids to be detected, typically through detection of an attached detectable label. It is generally recognized that nucleic acids are denatured by increasing the temperature or decreasing the salt concentration of the buffer containing the nucleic acids. Under low stringency conditions (e.g., low temperature and/or high salt) hybrid duplexes (e.g., DNA:DNA, RNA:RNA, or RNA:DNA) will form even where the annealed sequences are not perfectly complementary. Thus, specificity of hybridization is reduced at lower stringency. Conversely, at higher stringency (e.g., higher temperature or lower salt) successful hybridization tolerates fewer mismatches. One of skill in the art will appreciate that hybridization conditions may be selected to provide any degree of stringency.

[0175] In a preferred embodiment, hybridization is performed at low stringency, in this case in 6×SSPET at 37° C. (0.005% Triton X-100), to ensure hybridization and then subsequent washes are performed at higher stringency (e.g., 1×SSPET at 37° C.) to eliminate mismatched hybrid duplexes. Successive washes may be performed at increasingly higher stringency (e.g., down to as low as 0.25×SSPET at 37° C. to 50° C.) until a desired level of hybridization specificity is obtained. Stringency can also be increased by addition of agents such as formamide. Hybridization specificity may be evaluated by comparison of hybridization to the test probes with hybridization to the various controls that can be present (e.g., expression level control, normalization control, mismatch controls, etc.).

[0176] In general, there is a tradeoff between hybridization specificity (stringency) and signal intensity. Thus, in a preferred embodiment, the wash is performed at the highest stringency that produces consistent results and that provides a signal intensity greater than approximately 10% of the background intensity. Thus, in a preferred embodiment, the hybridized array may be washed at successively higher stringency solutions and read between each wash. Analysis of the data sets thus produced will reveal a wash stringency above which the hybridization pattern is not appreciably altered and which provides adequate signal for the particular oligonucleotide probes of interest.

[0177] Signal Detection

[0178] The hybridized nucleic acids are typically detected by detecting one or more labels attached to the sample nucleic acids. The labels may be incorporated by any of a number of means well known to those of skill in the art. See WO 99/32660.

[0179] Databases

[0180] The present invention includes relational databases containing sequence information, for instance, for the genes of Tables 1-5, as well as gene expression information from tissue or cells exposed to various standard toxins, such as those herein described (see Tables 5-5L). Databases may also contain information associated with a given sequence or tissue sample such as descriptive information about the gene associated with the sequence information (see Tables 1 and 2), or descriptive information concerning the clinical status of the tissue sample, or the animal from which the sample was derived. The database may be designed to include different parts, for instance a sequence database and a gene expression database. Methods for the configuration and construction of such databases and computer-readable media to which such databases are saved are widely available, for instance, see U.S. Pat. No. 5,953,727, which is herein incorporated by reference in its entirety.

[0181] The databases of the invention may be linked to an outside or external database such as GenBank (www.ncbi.nlm.nih.gov/entrez.index.html); KEGG (www.genome.ad.jplkegg); SPAD (www.grt.kyushu-u.acjplspadlindex.html); HUGO (www.gene.ucl.ac.uk/hugo); Swiss-Prot (www.expasy.ch.sprot); Prosite (www.expasy.ch/tools/scnpsitl.html); OMIM (www.nebi.nlm.nih.gov/omim); and GDB (www.gdb.org). In a preferred embodiment, as described in Tables 1-5, the external database is GenBank and the associated databases maintained by the National Center for Biotechnology Information (NCBI) (www.ncbi.nlm.nih.gov).

[0182] Any appropriate computer platform, user interface, etc. may be used to perform the necessary comparisons between sequence information, gene expression information and any other information in the database or information provided as an input. For example, a large number of computer workstations are available from a variety of manufacturers, such has those available from Silicon Graphics. Client/server environments, database servers and networks are also widely available and appropriate platforms for the databases of the invention.

[0183] The databases of the invention may be used to produce, among other things, electronic Northerns that allow the user to determine the cell type or tissue in which a given gene is expressed and to allow determination of the abundance or expression level of a given gene in a particular tissue or cell.

[0184] The databases of the invention may also be used to present information identifying the expression level in a tissue or cell of a set of genes comprising one or more of the genes in Tables 1-5, comprising the step of comparing the expression level of at least one gene in Tables 1-5 in a cell or tissue exposed to a test agent to the level of expression of the gene in the database. Such methods may be used to predict the toxic potential of a given compound by comparing the level of expression of a gene or genes in Tables 1-5 from a tissue or cell sample exposed to the test agent to the expression levels found in a control tissue or cell samples exposed to a standard toxin or renal toxin such as those herein described. Such methods may also be used in the drug or agent screening assays as described herein.

[0185] Kits

[0186] The invention further includes kits combining, in different combinations, high-density oligonucleotide arrays, reagents for use with the arrays, protein reagents encoded by the genes of the Tables, signal detection and array-processing instruments, gene expression databases and analysis and database management software described above. The kits may be used, for example, to predict or model the toxic response of a test compound, to monitor the progression of renal disease states, to identify genes that show promise as new drug targets and to screen known and newly designed drugs as discussed above.

[0187] The databases packaged with the kits are a compilation of expression patterns from human or laboratory animal genes and gene fragments (corresponding to the genes of Tables 1-5). In particular, the database software and packaged information that may contain the databases saved to a computer-readable medium include the expression results of Tables 1-5 that can be used to predict toxicity of a test agent by comparing the expression levels of the genes of Tables 1-5 induced by the test agent to the expression levels presented in Tables 5-5L. In another format, database and software information may be provided in a remote electronic format, such as a website, the address of which may be packaged in the kit.

[0188] The kits may used in the pharmaceutical industry, where the need for early drug testing is strong due to the high costs associated with drug development, but where bioinformatics, in particular gene expression informatics, is still lacking. These kits will reduce the costs, time and risks associated with traditional new drug screening using cell cultures and laboratory animals. The results of large-scale drug screening of pre-grouped patient populations, pharmacogenomics testing, can also be applied to select drugs with greater efficacy and fewer side-effects. The kits may also be used by smaller biotechnology companies and research institutes who do not have the facilities for performing such large-scale testing themselves.

[0189] Databases and software designed for use with microarrays is discussed in Balaban et al., U.S. Pat. No. 6,229,911, a computer-implemented method for managing information, stored as indexed Tables 1-5, collected from small or large numbers of microarrays, and U.S. Pat. No. 6,185,561, a computer-based method with data mining capability for collecting gene expression level data, adding additional attributes and reformatting the data to produce answers to various queries. Chee et al., U.S. Pat. No. 5,974,164, disclose a software-based method for identifying mutations in a nucleic acid sequence based on differences in probe fluorescence intensities between wild type and mutant sequences that hybridize to reference sequences.

[0190] Without further description, it is believed that one of ordinary skill in the art can, using the preceding description and the following illustrative examples, make and utilize the compounds of the present invention and practice the claimed methods. The following working examples therefore, specifically point out the preferred embodiments of the present invention, and are not to be construed as limiting in any way the remainder of the disclosure.

### EXAMPLES

### Example 1

### Identification of Toxicity Markers

[0191] The renal toxins indomethacin, diflunisal, colchicine, chloroform, diclofenac, menadione, sodium chromate, sodium oxalate, thioacetamide, and vancomycin were administered to male Sprague-Dawley rats at various timepoints using administration diluents, protocols and dosing regimes as previously described in the art and previously described in the priority applications discussed above. In experiments using toxins A-G, as labeled in Table 4, blood and tissue samples were collected at the following time-points: chloroform (A), thioacetamide (F) and vancomycin (G)—after 6, 24 and 48 hours of exposure; diclofenac (B) and menadione (C)—after 3, 6 and 24 hours of exposure; and sodium chromate (D) and sodium oxalate (E)—after 6, 24 and 72 hours of exposure. For these compounds, no significant changes in the levels of gene expression were found with varying exposure time, i.e., short and long time-points showed the same pattern of differential gene expression. The low and high dose level for each compound are provided in the chart below.

| | Low Dose | | Method of |
|---|---|---|---|
| Renal Toxin | (mg/kg) | High Dose (mg/kg) | Administration |
| indomethacin | 1 | 10 | oral gavage |
| diflunisal | 2 | 400 | oral gavage |
| colchicine | 0.15 | 1.5 | intraperitoneal |
| chloroform | 11.95 | 239 | oral gavage |
| diclofenac | 1 | 200 | intraperitoneal |
| menadione | 15 | 150 | intravenous |
| sodium chromate | 3 | 30 | intraperitoneal |
| sodium oxalate | 10 | 100 | intraperitoneal |
| thioacetamide | 30 | 300 | intraperitoneal |
| vancomycin | 50 | 500 | intravenous |

[0192] After administration, the dosed animals were observed and tissues were collected as described below:

Observation of Animals

[0193] 1. Clinical cage side observations—twice daily mortality and moribundity check. Skin and fur, eyes and mucous membrane, respiratory system, circulatory system, autonomic and central nervous system, somatomotor pattern, and behavior pattern were checked. Potential signs of toxicity, including tremors, convulsions, salivation, diarrhea, lethargy, coma or other atypical behavior or appearance, were recorded as they occurred and included a time of onset, degree, and duration.

[0194] 2. Physical Examinations—Prior to randomization, prior to initial treatment, and prior to sacrifice.

[0195] 3. Body Weights—Prior to randomization, prior to initial treatment, and prior to sacrifice.

Clinical Pathology

[0196] 1. Frequency—Prior to necropsy.

[0197] 2. Number of animals—All surviving animals.

[0198] 3. Bleeding Procedure—Blood was obtained by puncture of the orbital sinus while under 70% CO₂/30% O₂ anesthesia.

[0199] 4. Collection of Blood Samples—Approximately 0.5 mL of blood was collected into EDTA tubes for evaluation of hematology parameters. Approximately 1 mL of blood was collected into serum separator tubes for clinical chemistry analysis. Approximately 200 uL of plasma was obtained and frozen at ˜−80° C. for test compound/metabolite estimation. An additional ˜2 mL of blood was collected into a 15 mL conical polypropylene vial to which ˜3 mL of Trizol was immediately added. The contents were immediately mixed with a vortex and by repeated inversion. The tubes were frozen in liquid nitrogen and stored at ˜−80° C.

Termination Procedures

Terminal Sacrifice

[0200] Approximately 3, 6, 24, 48, 72, 120, 144, 168, 336, and/or 360 hours after the initial dose, rats were weighed, physically examined, sacrificed by decapitation, and exsanguinated. The animals were necropsied within approximately five minutes of sacrifice. Separate sterile, disposable instruments were used for each animal, with the exception of bone cutters, which were used to open the skull cap. The bone cutters were dipped in disinfectant solution between animals.

[0201] Necropsies were conducted on each animal following procedures approved by board-certified pathologists.

[0202] Animals not surviving until terminal sacrifice were discarded without necropsy (following euthanasia by carbon dioxide asphyxiation, if moribund). The approximate time of death for moribund or found dead animals was recorded.

Postmortem Procedures

[0203] Fresh and sterile disposable instruments were used to collect tissues. Gloves were worn at all times when handling tissues or vials. All tissues were collected and frozen within approximately 5 minutes of the animal's death. The liver sections and kidneys were frozen within approximately 3-5 minutes of the animal's death. The time of euthanasia, an interim time point at freezing of liver sections and kidneys, and time at completion of necropsy were recorded. Tissues were stored at approximately −80° C. or preserved in 10% neutral buffered formalin.

Tissue Collection and Processing

[0204] Liver

1. Right medial lobe—snap frozen in liquid nitrogen and stored at ˜−80° C.

2. Left medial lobe—Preserved in 10% neutral-buffered formalin (NBF) and evaluated for gross and microscopic pathology.

3. Left lateral lobe—snap frozen in liquid nitrogen and stored at ˜−80° C.

[0205] Heart—A sagittal cross-section containing portions of the two atria and of the two ventricles was preserved in 10% NBF. The remaining heart was frozen in liquid nitrogen and stored at ˜−80° C.

[0206] Kidneys (Both)

1. Left—Hemi-dissected; half was preserved in 10% NBF and the remaining half was frozen in liquid nitrogen and stored at ˜−80° C.

2. Right—Hemi-dissected; half was preserved in 10% NBF and the remaining half was frozen in liquid nitrogen and stored at ˜−80° C.

[0207] Testes (both)—A sagittal cross-section of each testis was preserved in 10% NBF. The remaining testes were frozen together in liquid nitrogen and stored at ˜−80° C.

[0208] Brain (whole)—A cross-section of the cerebral hemispheres and of the diencephalon was preserved in 10% NBF, and the rest of the brain was frozen in liquid nitrogen and stored at ˜−80° C.

[0209] Microarray sample preparation was conducted with minor modifications, following the protocols set forth in the Affymetrix GeneChip Expression Analysis Manual. Frozen tissue was ground to a powder using a Spex Certiprep 6800 Freezer Mill. Total RNA was extracted with Trizol (GibcoBRL) utilizing the manufacturer's protocol. The total RNA yield for each sample was 200-500 μg per 300 mg tissue weight. mRNA was isolated using the Oligotex mRNA Midi kit (Qiagen) followed by ethanol precipitation. Double stranded cDNA was generated from mRNA using the SuperScript Choice system (GibcoBRL). First strand cDNA synthesis was primed with a T7-(dT24) oligonucleotide. The cDNA was phenol-chloroform extracted and ethanol precipitated to a final concentration of 1 μg/ml. From 2 μg of cDNA, cRNA was synthesized using Ambion's T7 MegaScript in vitro Transcription Kit.

[0210] To biotin label the cRNA, nucleotides Bio-11-CTP and Bio-16-UTP (Enzo Diagnostics) were added to the reaction. Following a 37° C. incubation for six hours, impurities were removed from the labeled cRNA following the RNeasy Mini kit protocol (Qiagen). cRNA was fragmented (fragmentation buffer consisting of 200 mM Tris-acetate, pH 8.1, 500 mM KOAc, 150 mM MgOAc) for thirty-five minutes at 94° C. Following the Affymetrix protocol, 55 μg of fragmented cRNA was hybridized on the Affymetrix rat array set for twenty-four hours at 60 rpm in a 45° C. hybridization oven. The chips were washed and stained with Streptavidin Phycoerythrin (SAPE) (Molecular Probes) in Affymetrix fluidics stations. To amplify staining, SAPE solution was added twice with an anti-streptavidin biotinylated antibody (Vector Laboratories) staining step in between. Hybridization to the probe arrays was detected by fluorometric scanning (Hewlett Packard Gene Array Scanner). Data was analyzed using Affymetrix GeneChip® version 2.0 and Expression Data Mining (EDMT) software (version 1.0), GeneExpress2000, and S-Plus.

[0211] Tables 1 and 2 disclose those genes that are differentially expressed upon exposure to the named toxins and their corresponding GenBank Accession and Sequence Identification numbers, the identities of the metabolic pathways in which the genes function, the gene names if known, and the unigene cluster titles. The model code represents the various toxicity state that each gene is able to discriminate as well as the individual toxin type associated with each gene. The codes are defined in Table 4. The GLGC ID is the internal Gene Logic identification number.

[0212] Table 3 discloses those genes that are the human homologues of those genes in Tables 1 and 2 that are differentially expressed upon exposure to the named toxins. The corresponding GenBank Accession and Sequence Identification numbers, the gene names if known, and the unigene cluster titles of the human homologues are listed.

[0213] Table 4 defines the comparison codes used in Tables 1, 2, 3, and 5.

[0214] Tables 5-5L disclose the summary statistics for each of the comparisons performed. Each of these tables contains a set of predictive genes and creates a model for predicting the renal toxicity of an unknown, i.e., untested compound. Each gene is identified by its Gene Logic identification number and can be cross-referenced to a gene name and representative SEQ ID NO. in Tables 1 and 2. For each comparison of gene expression levels between samples in the toxicity group (samples affected by exposure to a specific toxin) and samples in the non-toxicity group (samples not affected by exposure to that same specific toxin), the tox mean (for toxicity group samples) is the mean signal intensity, as normalized for the various chip parameters that are being assayed. The non-tox mean represents the mean signal intensity, as normalized for the various chip parameters that are being assayed, in samples from animals other than those treated with the high dose of the specific toxin. These animals were treated with a low dose of the specific toxin, or with vehicle alone, or with a different toxin. Samples in the toxicity groups were obtained from animals sacrificed at the timepoint(s) indicated in the Table 5 headings, while samples in the non-toxicity groups were obtained from animals sacrificed at all time points in the experiments. For individual genes, an increase in the tox mean compared to the non-tox mean indicates up-regulation upon exposure to a toxin. Conversely, a decrease in the tox mean compared to the non-tox mean indicates down-regulation.

[0215] The mean values are derived from Average Difference (AveDiff) values for a particular gene, averaged across the corresponding samples. Each individual Average Difference value is calculated by integrating the intensity information from multiple probe pairs that are tiled for a particular fragment. The normalization multiplies each expression intensity for a given experiment (chip) by a global scaling factor. The intent of this normalization is to make comparisons of individual genes between chips possible. The scaling factor is calculated as follows:

[0216] 1. From all the unnormalized expression values in the experiment, delete the largest 2% and smallest 2% of the values. That is, if the experiment yields 10,000 expression values, order the values and delete the smallest 200 and the largest 200.

[0217] 2. Compute the trimmed mean, which is equal to the mean of the remaining values.

[0218] 3. Compute the scale factor SF=100/(trimmed mean).

[0219] The value of 100 used here is the standard target value used. Some AveDiff values may be negative due to the general noise involved in nucleic acid hybridization experiments. Although many conclusions can be made corresponding to a negative value on the GeneChip platform, it is difficult to assess the meaning behind the negative value for individual fragments. Our observations show that, although negative values are observed at times within the predictive gene set, these values reflect a real biological phenomenon that is highly reproducible across all the samples from which the measurement was taken. For this reason, those genes that exhibit a negative value are included in the predictive set. It should be noted that other platforms of gene expression measurement may be able to resolve the negative numbers for the corresponding genes. The predictive ability of each of those genes should extend across platforms, however. Each mean value is accompanied by the standard deviation for the mean. The linear discriminant analysis score (discriminant score), as disclosed in the tables, measures the ability of each gene to predict whether or not a sample is toxic. The discriminant score is calculated by the following steps:

Calculation of a Discriminant Score

[0220] 1. Let Xᵢ represent the AveDiff values for a given gene across the non-tox samples, i=1 . . . n.

[0221] 2. Let Yᵢ represent the AveDiff values for a given gene across the tox samples, i=1 . . . t. The calculations proceed as follows:

[0222] 3. Calculate mean and standard deviation for Xᵢ's and Yᵢ's, and denote these by m_{X}, m_{Y}, s_{X},s_{Y}.

[0223] 4. For all Xᵢ's and Y₁'s, evaluate the function f(z)=((1/s_{Y})*exp(−0.5*((z-m_{Y})/s_{Y})²))/(((1/s_{Y})*exp(−0.5*((z-m_{Y})/s_{Y})²))+((1/s_{X})*exp(−0.5*((Z-m_{X})/s_{X})²))).

[0224] 5. The number of correct predictions, say P, is then the number of Y₁'s such that f(Y₁)>0.5 plus the number of X₁'s such that f(X₁)<0.5.

[0225] 6. The discriminant score is then P/(n+t).

[0226] Linear discriminant analysis uses both the individual measurements of each gene and the calculated measurements of all combinations of genes to classify samples. For each gene a weight is derived from the mean and standard deviation of the toxic and nontox groups. Every gene is multiplied by a weight and the sum of these values results in a collective discriminate score. This discriminant score is then compared against collective centroids of the tox and nontox groups. These centroids are the average of all tox and nontox samples respectively. Therefore, each gene contributes to the overall prediction. This contribution is dependent on weights that are large positive or negative numbers if the relative distances between the tox and nontox samples for that gene are large and small numbers if the relative distances are small. The discriminant score for each unknown sample and centroid values can be used to calculate a probability between zero and one as to the group in which the unknown sample belongs.

### Example 2

### General Toxicity Modeling

[0227] Samples were selected for grouping into tox-responding and non-tox-responding groups by examining each study individually with Principal Components Analysis (PCA) to determine which treatments had an observable response. Only groups where confidence of their tox-responding and non-tox-responding status was established were included in building a general tox model (Table 5).

[0228] Linear discriminant models were generated to describe toxic and non-toxic samples. The top discriminant genes and/or EST's were used to determine toxicity by calculating each gene's contribution with homo and heteroscedastic treatment of variance and inclusion or exclusion of mutual information between genes. Prediction of samples within the database exceeded 80% true positives with a false positive rate of less than 5%. It was determined that combinations of genes and/or EST's generally provided a better predictive ability than individual genes and that the more genes and/or EST used the better predictive ability. Although the preferred embodiment includes fifty or more genes, many pairings or greater combinations of genes and/or EST can work better than individual genes. All combinations of two or more genes from the selected list (Table 5) could be used to predict toxicity. These combinations could be selected by pairing in an agglomerate, divisive, or random approach. Further, as yet undetermined genes and/or EST's could be combined with individual or combination of genes and/or EST's described here to increase predictive ability. However, the genes and/or EST's described here would contribute most of the predictive ability of any such undetermined combinations.

[0229] Other variations on the above method can provide adequate predictive ability. These include selective inclusion of components via agglomerate, divisive, or random approaches or extraction of loading and combining them in agglomerate, divisive, or random approaches. Also the use of composite variables in logistic regression to determine classification of samples can also be accomplished with linear discriminate analysis, neural or Bayesian networks, or other forms of regression and classification based on categorical or continual dependent and independent variables.

### Example 3

### Modeling Methods

[0230] The above modeling methods provide broad approaches of combining the expression of genes to predict sample toxicity. One could also provide no weight in a simple voting method or determine weights in a supervised or unsupervised method using agglomerate, divisive, or random approaches. All or selected combinations of genes may be combined in ordered, agglomerate, or divisive, supervised or unsupervised clustering algorithms with unknown samples for classification. Any form of correlation matrix may also be used to classify unknown samples. The spread of the group distribution and discriminate score alone provide enough information to enable a skilled person to generate all of the above types of models with accuracy that can exceed discriminate ability of individual genes. Some examples of methods that could be used individually or in combination after transformation of data types include but are not limited to: Discriminant Analysis, Multiple Discriminant Analysis, logistic regression, multiple regression analysis, linear regression analysis, conjoint analysis, canonical correlation, hierarchical cluster analysis, k-means cluster analysis, self-organizing maps, multidimensional scaling, structural equation modeling, support vector machine determined boundaries, factor analysis, neural networks, bayesian classifications, and resampling methods.

### Example 4

### Grouping of Individual Compound and Pathology Classes

[0231] Samples were grouped into individual pathology classes based on known toxicological responses and observed clinical chemical and pathology measurements or into early and late phases of observable toxicity within a compound (Tables 5A-5L). The top 10, 25, 50, 100 genes based on individual discriminate scores were used in a model to ensure that combination of genes provided a better prediction than individual genes. As described above, all combinations of two or more genes from this list could potentially provide better prediction than individual genes when selected in any order or by ordered, agglomerate, divisive, or random approaches. In addition, combining these genes with other genes could provide better predictive ability, but most of this predictive ability would come from the genes listed herein.

[0232] Samples may be considered toxic if they score positive in any pathological or individual compound class represented here or in any modeling method mentioned under general toxicology models based on combination of individual time and dose grouping of individual toxic compounds obtainable from the data. The pathological groupings and early and late phase models are preferred examples of all obtainable combinations of sample time and dose points. Most logical groupings with one or more genes and one or more sample dose and time points should produce better predictions of general toxicity, pathological specific toxicity, or similarity to known toxicant than individual genes.

[0233] Although the present invention has been described in detail with reference to examples above, it is understood that various modifications can be made without departing from the spirit of the invention. Accordingly, the invention is limited only by the following claims. All cited patents, patent applications and publications referred to in this application are herein incorporated by reference in their entirety.

LENGTHY TABLE REFERENCED HERE
US20070015146A1-20070118-T00001
Please refer to the end of the specification for access instructions.

LENGTHY TABLE REFERENCED HERE
US20070015146A1-20070118-T00002
Please refer to the end of the specification for access instructions.

LENGTHY TABLE REFERENCED HERE
US20070015146A1-20070118-T00003
Please refer to the end of the specification for access instructions.

LENGTHY TABLE REFERENCED HERE
US20070015146A1-20070118-T00004
Please refer to the end of the specification for access instructions.

LENGTHY TABLE REFERENCED HERE
US20070015146A1-20070118-T00005
Please refer to the end of the specification for access instructions.

LENGTHY TABLE REFERENCED HERE
US20070015146A1-20070118-T00006
Please refer to the end of the specification for access instructions.

LENGTHY TABLE REFERENCED HERE
US20070015146A1-20070118-T00007
Please refer to the end of the specification for access instructions.

LENGTHY TABLE REFERENCED HERE
US20070015146A1-20070118-T00008
Please refer to the end of the specification for access instructions.

LENGTHY TABLE REFERENCED HERE
US20070015146A1-20070118-T00009
Please refer to the end of the specification for access instructions.

LENGTHY TABLE REFERENCED HERE
US20070015146A1-20070118-T00010
Please refer to the end of the specification for access instructions.

LENGTHY TABLE REFERENCED HERE
US20070015146A1-20070118-T00011
Please refer to the end of the specification for access instructions.

LENGTHY TABLE REFERENCED HERE
US20070015146A1-20070118-T00012
Please refer to the end of the specification for access instructions.

LENGTHY TABLE REFERENCED HERE
US20070015146A1-20070118-T00013
Please refer to the end of the specification for access instructions.

LENGTHY TABLE REFERENCED HERE
US20070015146A1-20070118-T00014
Please refer to the end of the specification for access instructions.

LENGTHY TABLE REFERENCED HERE
US20070015146A1-20070118-T00015
Please refer to the end of the specification for access instructions.

LENGTHY TABLE REFERENCED HERE
US20070015146A1-20070118-T00016
Please refer to the end of the specification for access instructions.

LENGTHY TABLE REFERENCED HERE
US20070015146A1-20070118-T00017
Please refer to the end of the specification for access instructions.

LENGTHY TABLE
The patent application contains a lengthy table section. A copy of the table is available in electronic form from the USPTO web site (http://seqdata.uspto.gov/?pageRequest=docDetail&DocID=US20070015146A1) An electronic copy of the table will also be available from the USPTO upon request and payment of the fee set forth in 37 CFR 1.19(b)(3).

The application's sequence listing, which the Patent Office published only in electronic form, follows.

SEQUENCE LISTING (1261 sequences)

SEQ ID NO: 1 - DNA, 233 bp, Rattus norvegicus
  Genbank Accession No. AA012709
ttttttttttcgcattttgtacatgaatgtttatttctcaattaaacattccctttaaacacaaggaatgaattctaaatcttcataaagatgaataaaaaatgatatccctccagtatagcgtgtataatcactgtccttggtcactactggcatttactgtttaacatcaaaaaacaaaggttatttaaaaatcatgctactggatttctaccccctccgctatgaccgaa

SEQ ID NO: 2 - DNA, 158 bp, Rattus norvegicus
  Genbank Accession No. AA108277
accctttgaactagaagctttctattctgaccctcaagcagttccatatccagaagcaaaaatcggccgttttgtcgttcagaatgtttctgcacagaagatggagaaaatctaaagtgaaagtgcgcgtgacacacatgcatttcacatatccgctc

SEQ ID NO: 3 - DNA, 318 bp, Rattus norvegicus
  Genbank Accession No. AA685178
  misc_feature (1)..(318): n = a or c or g or t
catccaacaagaagctacactttattagtgatagaaacagtacaaattttaaaccaagctgtagttccacttttcaaacaccaaaaggggggggangggggaggagggtgtccttgctgtcagataattacattgttaattccataatagcatttacaatatcgttactgtngtttttnagggctcggacagcctttgctcttgacacatttgcttgtgacatgaccaactctatgtccttaacttccacacccgtttcatcaacctcctcttcttcgntctcctcttggacagtcggcgtctgcggtgttctcctga

SEQ ID NO: 4 - DNA, 308 bp, Rattus norvegicus
  Genbank Accession No. AA686579
  misc_feature (1)..(308): n = a or c or g or t
cggagacccccgggtgaatccaccgacaccatgtctgaccaggaggcaaaaccttcaactgaggacttaggagataagaaagaaggagaatacattaaactcaaagttattggacaggacagcagtgagatccatttcaaagtgaaaatgacaacacatctcaagaagctcaaagaatcgtactgtcaaagacagggagttccaatganttcactcaggtttctctttgaaggtcagagaattgctgataatcatactccaaaagaactgggaatggaggaagaagacgtgatttgaagtttatcagg

SEQ ID NO: 5 - DNA, 619 bp, Rattus norvegicus
  Genbank Accession No. AA799279
cccaagattaaatgattattaaaaaagcgtgccactgtatagaaatcaacattctctcccataattctgtgcattgggactatagaaatgtcactgtccctgctccacatcttcaaattaacattctcaggtcacaatagtaagtcttcccacaaggaaccttccggaaaaacaagctgtttcctcggctcatatttcccgctttttgtagcatgcaccagcaatctatccaagaagtatatattggggagtaaggaggagatccaccagcaagcccacagttgttaacagccataagattagatacaagcacaaagggatatgtcaacatactggcaaagaatcctgtgacagcttgggaataacttttcatttcattcatggtagagaccccactgtccagtgcataggtattgatgagataagccagtgagttacacagccacaaagaaatgatgtcacctaggaggcgaggaatgaggcccgcaaaaaatcctacgatgccttcttcccggtagatggttactatggagtcacacagtccgcagtacttagactctctgccgataaactgtaccatggacctcagagtaatcaccttgaagggatgtgtaatgag

SEQ ID NO: 6 - DNA, 496 bp, Rattus norvegicus
  Genbank Accession No. AA799294
atctgtgtagaccacaggcaggtgtttgtttctggcatggccacattccagatacaagaacgtagagagacccagcaaggcaccacaccctctcatggcagagagggagcagtggggcagggtgagggccagctaataaagcctcccctcccccccttaactttgttcatagggcaaatggctgacggaaggagaaggtgggtaggttgagagggtatgcgtcaagacttggggagaggtagcagatagccgtcttgaggctctgttttcaatgagtagtcctagtcgaccttaaccaaagctccatccgattgtattcttgccaaaacacaacagacacatgcacgaacatggggcgtaagcaataatgtcctctcgtgttctccacggctgctcgaaccaagtggctggttcatttggttgacactgattcgcctttaaccatgacggttcctgttttttatttcacagaaagccaataaaattgtttagctat

SEQ ID NO: 7 - DNA, 617 bp, Rattus norvegicus
  Genbank Accession No. AA799330
tatttaattggaatacatgtcctgccaaccaaaccataaaacacttcatgggaacccatcacacatgaaaccccagcaggaccaacaagtgcggccttgcacttgtcaaggatgctgtagaagaagaaactattgagtttccgtcttaatcctcttcagaacttgaatcatcctcttggtcagaaagttccggcacagggaagcggagaatggcagctactccagtcagctgaccaagctgttccccagacacgtggagactggagaatatccttacggtgcccgcattctctttcacactgtccaccagcctgacataccggctccgggtggccacatcctgatgccggaagagctcatcactgatgagcaaggtgtcaatcgccaaggcttcattggccctctccacctgcttgagtccatagaatgctcggtcaggttcgtgctgtaacattttgtagaagtcatccaaggcttttacttccccggcagctttcgtgtctgaaaggcggctcgctacagtaggatcacataggacctctttcagggagtacctgtgtccagaggaggcgtgtacctgaaggaatttggagccgttttccaggagcaccttgttt

SEQ ID NO: 8 - DNA, 644 bp, Rattus norvegicus
  Genbank Accession No. AA799465
caataaccaagatattggactttattaaaattgaagattatattagtcaacttacctgttgctttgacaaaataccggatacaaagaactgtaggaaagaatgatttgttctggctcccagtccattgtaccagtaggagcagctcataactgtaacagcaggaacatgagagttcgctcacatctctgtcttgggagatggtgtcaggagaagctcaaggtcatcctcagggatgcagtgaactcaaggctagcctggggtacatgagaccagcatccaatcccgaacggcatttttccttcttgccggatcatccttcccagaaccctggggagaaatgccaagactgtcctgttcacgtcatcttgttttgcctggattttgtgggtgaggagccttcagtcttcctcgagaacacataggtacaagacttgtatgaatcttcagtctttcctcaagtctggatgacagatcccttctattgctgctcatcgtcttcaatttcgtcatctgggtgagcaccactggggacgggcgtatcccacgcagccacccgggcacgcacttagccaactgagaagcccaccaaacgccagttccgggccactgttggctccgacgccgttgggggctgcgcccctcc

SEQ ID NO: 9 - DNA, 637 bp, Rattus norvegicus
  Genbank Accession No. AA799518
  misc_feature (1)..(637): n = a or c or g or t
cataccagctcaattttaattttaaagtgaaaaatgtacaggtgggaaagttaagcaacgccctgcagattcataacaaggagctgacctagttgtcccactacaagctgacagctctccagcagtgattgatttgtcacagcacagaaatgccaccctggacttgtggtccgcttactaactggaggaagcagttttaagtcttaccacggcctgtgctcaaagtgagcactgcactttgagaaagttgtttgaccagtcagcaatgtctgctagctgacttacccgactggccatgagtctcatctgcacgttgactcgcctaggggagggtcctggtctgtgtcaaactctctggtaccataaaaaccaagtaacggtggatctgacaggttaccctgagagcttaagaagcagagtatttaacttcatttgtaganaagaagggagtagtacaggctataggctgaggtagccttcatttaaagtgcaatctacttgcgataaatatagtaactaggacccgttccaagcagctatcatagtcatgttgatgctagctaactagaacctggttggtcagttctcacacacatcacaagcagaagcccttgcagtaagctatcagtgagaagag

SEQ ID NO: 10 - DNA, 524 bp, Rattus norvegicus
  Genbank Accession No. AA799534
  misc_feature (1)..(524): n = a or c or g or t
aatgttaccactccaactatttgccaacagtaacactggtatattttgtcaatgtacaatacagagagcacagcccctcatgactggtgccaggtcacatgcagcacagttcctcttccctgtcagacagtgtctttaactaaggacagacagtacgtggagcgtaagcaagggattcgggcactgtgaagcgggcagctcctcgccagctggccccagtcagatacactatggtggtcagttctttctgtgcagatgacaagggaaagatgaaccatgctgacagaggatggggcaggcgggtcgagccactgtgagtcagaaggctgacctccacgttgcaggatttgctctctgcanggatacagagtgctcagtttgcagatctgctggtacgtgacctcgatgatgacgacatgaatgggagggagatgggtgacccaagcaggccagcagagtgatgatgggccagagagggctcctgatctctcttgtggttgggcaggccccggtggctcatgagg

SEQ ID NO: 11 - DNA, 528 bp, Rattus norvegicus
  Genbank Accession No. AA799567
  misc_feature (1)..(528): n = a or c or g or t
gaaaattccatacatggatataaggtgcttttatcaaaaccataatgcatgtccttctcattcatctcctagtcctacatatctatttccacctaaactcatgtgctttcttttacagctcactgaatcccttagcgctgcctatatgtagcgctaagtgcaggtgtacagcatgggtagcctctcagggaccacatatctgacgaaagctgactctcctcccagcagtcatcccaacagatctccaactagggatgggacttcctgatccctaccccacttatgctgagactttgactgagcttaatactcttcaatatttttctcctaaataagatttctaaacacagaactataaaattttgagcagaaaaaagtcttgtttttatgtacacaagcataatctgtgggtattgcagtcacagattaacaagagcataaaaacgagaggcagagcaangatctcttttcangaatgagaaaaaaacccacaaggctccagatctccananagtggtgtgcacaagg

SEQ ID NO: 12 - DNA, 597 bp, Rattus norvegicus
  Genbank Accession No. AA799591
cagacactatgaattgctttaatggtggtatctgtacaagtgatgtcaggacacaggacagcaaatgcacagtggacatggctagcagacaagctgtgaatgaataaagagttcacactgctcccatgctgtagtgactaagacagctctaagccacctcctcctcagcctcctcctcaaactctccttcctcctcagctgtagcatcctggtactgctggtactcggacaccaggtcattcatgttgctctcaccctcagtgaactccatctcatccatgccctcgcccgtgtaccagtgttggaaggccttgcgtcgggacatggctgtgaactgctctgagatgcgtttgaaaagctccggaaaggccgtgctagttgccaatgaaggtgccgggcatttttaaggcaccgggtggaatgtcacagacagctgttttcacgttgttggggatcaactcgggcaagtaactgctgtccctgttttgggcatttaccatcggtgcggcaccgccttcaataacatgcggcccctgaaaaggtagccactgtcaagtaacgcccatggggggatgagaggagccatcaggtcctaac

SEQ ID NO: 13 - DNA, 591 bp, Rattus norvegicus
  Genbank Accession No. AA799600
cacagtctgtgcagcttttatttcaacagggaagtaataagatctatatacagtctaaaaccactagaaaaggtgagtaaaaaggacccatggtccatctgggtccaaccaggggcggtggcacatgcctttactcccatcacttgggaggtggaggcaggcagatctgtgagtttgaggccagcctggttgacagtgagttccaggcaagccagagctacatactgagaccctgtctcaaaacaaaagtctatggagtgatatgaatggtggggccgggcaagcatcgtacctggcgtccagagcagggcctgggcatttctctggtacatgtaggagtgaggccttatgaaagaccccgcactgagcagaggcacagaggacactgcctacctgtttgagctgtctacctgtctccacaggacaggcggacattccaatgccatcatcgtaggtccagcctgacttacacacccagaagggatcaagcctggcctgcattctgtaaggatgttcagaacttcacggtgctattcagagcccccgagaatagccggtcgcgggagatcaccagtggagtgtaaatgtcct

SEQ ID NO: 14 - DNA, 520 bp, Rattus norvegicus
  Genbank Accession No. AA799654
ttcaggcccaaacagttcatgagtgcagcatgcagcacccatggtccactgcaggccactccatcagtagcaagacccgaattatcagagaccggtgcctgtggcctgccacccagggtacactcaagacgccaagggtgtgggtttggctgagtatgaaaggtaccaggcagaggtcagcttggggctatgtgagctggccaacccaagggaagagggtaggtgaacagggtttccagtgtcccgtgtaccccacggcggccaagaggctaacatggggtctctggtgctgccaacaaggcctaccctagtgctaagcctgcggctgagtgagcaggttgtgtgttggggtcaggatgcccctcctaaggcgttactgctataagctactctgtcccagggcagtaaggaaccacaggggacattttccccacgaggttccaatgggtcaaatcactgaagccttcagcgcctatggctggcacaccaggggaacaagggcgtgggcgtgggtgtggag

SEQ ID NO: 15 - DNA, 589 bp, Rattus norvegicus
  Genbank Accession No. AA799676
aatgatcaacttatgcattgtttatgggataccattataagaaaataaaacagtatagagttgtagaatcaataaatgatataattgatagaaaagtgaaataaacttggtatgtacaaggtatagacaagggttgaagaaaagaaatgagtatgcagatacccgtgctgtgattgaagtagctaaagaaagcagtattactggcaaatgctaacaaataactgtggggtgtgaattggtggcccccacacactcctgtgtttgaatgctcggctcacagggagtggcactgttaggaggtggcctccttggaggaagtgtgtcactgtgggggtgggctctggaggtctcctccttcgctcaggctcgaccacgtggggagagcttccttttggcttcctgtacaagacagtctctttctgactgcctttggatcaagatgtagaactctcagctcattctccagcaccattgataggaagcctggatgctgccatgtctgcccaccttgatgataatggacggaacctctgaaactggagcctgcgccaattaaatgtttttcatgttagagttgccttggatggta

SEQ ID NO: 16 - DNA, 671 bp, Rattus norvegicus
  Genbank Accession No. AA799751
  misc_feature (1)..(671): n = a or c or g or t
acacctaatacatgaaaagaactctgaattgaaatccagccatctagaaataattctggtcataaaatgcacaattatcccatgtgtccaaagtctgctgagtttgctctgaagtttgtatttactccaatatctagaatgtctcaggaccacatgctgatactacacagaacagaagggagctgagcagaaccacacgtaaatgcaaacttaagaactttatggtattgctctggtgccttatgtcttaagcactgaccagagagttaagtgtgagctagaaaagttttcagagaaatgagctgcagaacttcctaccccacccctaggttattcagagcaaggagggctgatgtgggggatgagaacctacagactgaacatcctgctttcttcctacctcagtccgacgctggacatcctggagtgtaaggcactagaactggcctgagaagtgctccaagcttcagttcttggtgtgcaaaagaaattgtggcatagatcttttgaaacataataaaataactcccccctcctcttatattctgttattcacagacaaaaagacaaggaggtanatgtttgcaaagattaaaaaacaggtgaatcaaaatatgaagaaagtgtgtatacntattcagatatggagaaccacttagagggcaanagtc

SEQ ID NO: 17 - DNA, 631 bp, Rattus norvegicus
  Genbank Accession No. AA799771
actagacacctttgataatgatagaatgagtatcttgtcttaaacattctcagcactatgcccttattacatatgacatctaaaaacaagatactcattctatcattatcaaaggtgtctagtaaaaaaggaaagattgacattgaagatgggactagaaacccctacttaggggccttcaaacggtttctcacacacatctgtgaggtaggttattatccacattttgtacaagagaaaactacacaaggttacataccttgtgctgccataatagcaaacagggaattagatccaattagatccggtccttagctttgcatttcttttctttataaactttaaaatataaagactgctagtaattgcattcattttaaaagcataagaaggcagccaaatagtttcccgggtggctttacaaagtgaaacaaatgaacagaaaatgcattcagtgaagacattccaatggtgacgctgtaaggtctggtcaagtggaaccaaaaggcagaagcaaaccacgtgaccgcctgtgggacaggtctcaggaaaacgggggagctgggggcagcagactttgaacacacgtttacggctactctgcaagtatttgagaatgcaccaggtactc

SEQ ID NO: 18 - DNA, 483 bp, Rattus norvegicus
  Genbank Accession No. AA799971
acataagaaggaattccaaaggtatacccaaggggcattgatcataagctgaacacgcagagggccccaacgaatggcacagagtctgaacggattggcacgttcaacttccattcatgatggctgaatactccttctggtgctcaaccattctcagaaacacttgatatttcttgtcataatattttttatcagcacgctctgggaacacaaccttccccactttgctcattcttgccattgcctcctgcacagaagcaaagtcccctgaggcacaggcacccagaatagcagctcccacgaggacagactccacctcttgtgacagaaccacaggcatgccagtaatgtcagcatgcatttgcacaaaaaggggattcttgcttaggcctccacataagaagagggtactaagagaatgtcctgctgcttccatggtctcaatgatgaagcgagtcccgaaagcaatggcttgaatagtgg

SEQ ID NO: 19 - DNA, 558 bp, Rattus norvegicus
  Genbank Accession No. AA799981
gctaaaaaatgcctttatttccagccagataaaattttttcaactgtatatatggttacacatgaaaaggtacacctctgtcgtcggccttgtttacaagacccagagcttcttattaatgtgagtatcaaacaaccttctttgtctctgaaacataactcaagtaggcggccgatggacctgccacacacgtgttcgaggatgggagtggcacggacttcttcgccaatgagtcgacgtgggatgaaggatgtggagattagattccaccggccagtcagcaggtggcatgcagcggaagcccgcctgctgaccgcactactgtggtggtggcccttctatgaacaggagacaaagaagacagacctatatgcaatgtggagaggcctttcgcagagtgcgaacaccattaggtggaccccagaacgagtaaaggcatcatgaaggtgactctaccgtgtacactactgaagagtatggcacctttttatttgacactcaataaatatctagttactggaaggaagagactcaagacacttgagctgttgtcaagac

SEQ ID NO: 20 - DNA, 556 bp, Rattus norvegicus
  Genbank Accession No. AA799995
  misc_feature (1)..(556): n = a or c or g or t
aagatgcatttgacatgccaaccccattcacaaaaatacatggttccattgtgtagtaacagtcccactcgtgtgagggaaaacacacgcctctaatgcaaagctgctctcagggttacaagtaaaggagatgcctctgcagttagggaagcgactactgcaatcgtgaacgggaataactgtactccctgcataacgagagattattttggagacagttgataaaaaccatacaactttttagtgttaagtcaaagagtatcaaaatcanagcaaactacaggtaagactaacaaaactactaaggacatcacagagtgaaatggactagggcaggcaattatgatatgacacaggagataagaggaacattaaatgtcanagatctagggaagatccgggtactgattccacagcgctagtagtgatatgggttagatctagctccacagtgctagatcacctccatgggcatccgcaactcccttccaggtctttcacacttaatcagtgtcatcccgattcatacgcacatcgaagcgctctcagaatcatg

SEQ ID NO: 21 - DNA, 556 bp, Rattus norvegicus
  Genbank Accession No. AA800305
ttttacaccactttattccaacctgagcacctcaatataaaactaaacactggtgagctgttctccttactaattttgagttactgtaaaatgtacacattctgctagcagatcaacacttaaatagattaaatcatctgacacatggtagatttcatataatgaaaatacctaaaataattagtgcaatatactgattaaaataaaattgacttcaaaaaacaaggcttcaagattactaataacattgtaatacttatgttacaaattgcaagtacggtgtttattatggttctagcatgtaagaacagcaaagccccttcctttcatagggggagaaagaaataattagctgttttagtaactgtacattttgtatgtttaggcaattcttaaatattacaggaaataataaacatatggagactacaatgcagtactctatttacagtacagctgaatatttaaaataatcaagtttgaatgtacataatggttagtgcactgactaatcatgtccaaagggaagcagagccccctccctgttctagcctcg

SEQ ID NO: 22 - DNA, 627 bp, Rattus norvegicus
  Genbank Accession No. AA800587
cattcctaccctttattggactctaaaccgagctggctctgggcccttcacaacgtctcagacatcccccagaagggtttaggaagatgccatcattctgtgaagaaggcctagcacctaccccagacttagagcccccagtggactccctaagagcctttagggagctaaaggaaatgggtggcaggaaggcaaggggacaatattgaggaaatgcttcggtttcccagtgtctcctgagggtacactgagctctgaagaggactacttggagaaacagtcggagattcctaggctgagcagccctcatttagatggcaactttgaggagacgtttgatgtcaggctcgatgttgatggtctggaaggtgcggctgtagcgacggaaaggctcgccttctggccctatgaggaacttctcagagttccaggacacatctgagcggcgcaccggactccatatgatgagcttgggatcggtcatgagggagaatgggtcgtcataagggtacggcagcttgtctttcaggtacgcaaagacaggatgctgattctgcccattgacatcacacttttgggtaagactgaaggtgggctggaacccacccccagggcggacatacttga

SEQ ID NO: 23 - DNA, 506 bp, Rattus norvegicus
  Genbank Accession No. AA800613
cacactcaagattttatttaaaaattccaaaaaaacccacaaaaatagacttgtacggtaacaatatattacttaatatattatagtatatacttaatacagtatcagttttaacattacaaaaagaaaaacggagtagacgacccaatatatataaatactataaaatcttattacaataaataaagtcgtcataaataaagggtccattggttggggcaggggcgtgggggaaaagggatttggcaatggctttggctatttgctttgggagggaaatttgagcaccaggattctcaggagaggctacaaccaccggacactgaacttcggggtctagtaaaaattaggatactattgtgggagccgggtcttcacagcacttaacattccaggagaccagagtttccgaggggctggtgcatacctgtaaccccagaacttggaaaaggctaaggcaggattatattgagttcaaagccagcctggggtaccctagtaatccc

SEQ ID NO: 24 - DNA, 475 bp, Rattus norvegicus
  Genbank Accession No. AA800753
agacaacagtatgtagtagttttgaatccactgagatgttgctttcaatttgaaatattgtgtatacatgtatataaaaaataatccaatgtatgactcatctgacagatgtttaagatcaataaagtttttgaacatgcatttaggaagagaggggagaagcccaccccgctaccctgttgttgctggcttatttctgcagtggtctcaatagtggtttttagagggaaccatgtgccttcagtcttcagagttacgataagataccataatcaagacgggaggggaaatggggaatgggcaggtattaatcttaaatacattttgcactctatctggtacaagataaaaacaggttaatggggataggtattaattaggaataaattgcagtcagatcaagacataattgccgaattgagtttttaatagactgcatatatagatgtttagccatactctagatcaactcttt

SEQ ID NO: 25 - DNA, 531 bp, Rattus norvegicus
  Genbank Accession No. AA800771
gccataataacatttattaacttcctaagagcttgatcaaacaagccccatgggacatggggtagggtggctaaacagtgtggtcaggaaagtcaatgattagtcacaagggtcgccattaaagagaacatggtagccccgcgggctcgccctggatgagctggaacacattcttccctgacccctgaaaagacaggagtgcagatggagcagtaaactggagtgaactgctcagggccctgctgccacgtagctacatcttgcggacgcccccgtgtggtgatggcaggaagcactggctttgtcctggagatcttttcctttgaaaaagtcgcgaggagcccgctgtggtaattgggagagtgtgaccctgaggacagtttgaggacatggcatctccccaacagtaatagatcccacatctggacaggtgtcagtctgagattcaaagcaaggtggagagtcctccaaagtcacgagcagctttgcgaccccaggccgtgtcatctgacactgtatgtggtacataag

SEQ ID NO: 26 - DNA, 528 bp, Rattus norvegicus
  Genbank Accession No. AA800790
acacaacaagaggttagcaactacacaggctgccactttaagtgaccagagccaaacaaaacacaattctttcacatggctttattacaattgcatgttagacacgacacacccacgttttgatgaaaacagtgttcctttggccgttgcacatgatcaatactgagcaatgtttgaacacagaccaacaatagcggtagaaaatttagggagaaaacagactgaattcactcataagtcttttgacctctaacatccctgggaacactatttttttgcattgctatgttaggcagtgtaaatgttagaaactatgctttaaatacgatggtaccttctcttatcttggcttcaattatgcaaagaaagtgtgcatgtttcttaccacgcctgctctgtatgctaaaattttgaataaaaaaaagccactgaatatagttttattgcatatattgcatggatagtgttcttatgccatttcatgatttggcaggatgattattacccatgagtctaacatgatgagag

SEQ ID NO: 27 - DNA, 310 bp, Rattus norvegicus
  Genbank Accession No. AA800844
aagtaagattagaaacaacaagattttttttgaggctgatgagtgcaaagagaaacgctaaacatcagggggccggcaacagacaaaatggtgttgtagaggagacttaggtacaaaacggggtctggcatccagaggccctgtgggtttgggccatgttcactccctgaggccggcggggagggatgccccagcgggcagctgccctcgccctccggctaggcgggtaggcttcttgggggaggcggcctgcaagcaggtcctgcttttcaaggggagacaacgggggctccgtccactgagatcagga

SEQ ID NO: 28 - DNA, 560 bp, Rattus norvegicus
  Genbank Accession No. AA801076
cattgagaaagcatagctattgtgaaataataattcgccagaaattacatctaacatctagcgctgccaaatagtgtcactgtactattttatatcattcgaaatggaattcaattctgtaactaacaactgtcctactaggtgagagagaaagattatgtgagaaaatcagaataccatgtgatttgtagatttgggacgttcagaaacattgggaactaaatttagaatgggccaaagcctggaagatgggtctcacaccagaagacattccaggagctagccattttaggagatgtccctccaaagtgtcgcgatgatggccttgcacttgggaatcaggttctgctcacttggacatccctgcgtcatggactcttgctgcccccgttccatgtgctcgcaattccagctactggaagccaccaggaatgctttctaattatcatttgcaactagaactgtaatcagaaagaaaatttgtatttttgtataactcgattgtgtgccattttatataacaggtcctgttttacaaataaattttgttttactaactt

SEQ ID NO: 29 - DNA, 533 bp, Rattus norvegicus
  Genbank Accession No. AA801165
ccgtctgtttgcgctctcgtgatgtccggccgtggcaagcaaggaggcaaggcccgcgccaaggccaagtcgcggtcgtcccgcgccgggctgcagttcccagtgggtcgcgtgcaccggctgctgcgcaagggcaactacgcggagcgcgtgggcgccggcgcgccggtatacatggcggcggtgctggagtacctgaccgccgagatcctggagctggcgggcaacgcggcccgcgacaacaagaagacccgcatcatcccgcgccacctgcagctggccatccgcaacgacgaagaactcaacaagctgctgggcaaagtgacgatcgcgcagggcggcgtcctgcccaacatccaggccgtgctgctgcccaagaagacggagagccaccataaggcgaagggcaagtgaggcggctgctggcaccggcccgcgtctctacgaacccttccccccccccagagaactctcaaaaaacggctcttttcagagccacccacagaatcagataaagagttgtgtcacggtaa

SEQ ID NO: 30 - DNA, 492 bp, Rattus norvegicus
  Genbank Accession No. AA801212
aaacgatagtacaaaattgtatatataatatagatctatataggtatacatacagagatgctcatccacacacatatacacggaagcttgtgcatcagaatcaaactgtttatcctaaataaaaaagaaacttttgttttcctgaaagtttactatacataaggctgccggacaacttgaaaaccaaggcaacactgagaagaaccccggggcaccctcctctccatggccttggcagagcacacactgggccaggccagcgagcacagttgctactgtaacagttgacatagcgagacgccagaaactacgtgggaacagaggggtaacctagttagttctcagaaacaaatcacctcagaacaaagtatgtggttgggaaggaggagagaaaggaaaggtgagtcccacagattagagatgaccgactaattaggttccagtgcctggcaaaaccttccaaagacaagagccgtgggacagcagaaacag

SEQ ID NO: 31 - DNA, 285 bp, Rattus norvegicus
  Genbank Accession No. AA801395
aaataaaaaatggcgtcttttattcatcaatccccattcacactgaaattcatgcatctttcttacattacttcgcaacatccttgctatcctttcccccctaagtcaacctgatgagttcatctttaagctcaagaagtttttctttttatttctgaaatgctacttacatgttgttgtctcaatatcaaggccaatctatgaatttattcttcctacgggtgaaatgggtgttaatacgggaacatgtgagcacctgttcaagatgacagcaaagttaggccc

SEQ ID NO: 32 - DNA, 454 bp, Rattus norvegicus
  Genbank Accession No. AA817688
  misc_feature (1)..(454): n = a or c or g or t
tttttttttttttttttaacttctaatatgcttcctttattggctttccgaattataattgtgggggaaaaaaaatcccgcagagtcaagaaaagtagacactttctcttcctttcttgtccagggtaacagtggttaacagtgtaaatagataaaaatccaagttggttttttggagaacgttgtctgcagactgccaatcttgacgtttctagagccaaggactcagaattccttcttctagatgaccgtacccacgtggctctgcgcatccaagacaactcgtacttctttctgcgagtaaccactccgtggtcgtgggagagcggactgaaatccacttcccagcgctggaaagtcagtggcttcactttggataactccatctgaagccttcttggcatgtancgctctggggagcactgcggaggcgctgggttaggtgcggagcgtc

SEQ ID NO: 33 - DNA, 522 bp, Rattus norvegicus
  Genbank Accession No. AA817726
ttttttttcttttttttgaaacacaaagtcccatttagtgtttttttctgatgcacaaaggagttcactcaatacattaacaataagcaaatcatacagatactgaggggaaggatgtccccttgactacatacacatatatgtatctattcttaagaacagcaatcaagaggttaacaataatggaaggaagaagtagacaggtaagtcactgccaaataacacaagttcataatgatcggttactcaagtaacctggcaaatgcctgctcagaatttacatttactttcctcattgactttcttgcctttgtgtttcagtgaatttggactaggtccaaaaactagaccttcaaaactccatctctcacattcagtgctgaagatgggcatgaaggtggagtatacttgagaacatgcatggtaacgaatgtcaaagagttttctcacagtgacctttcccctgtctgcttcttcccacacctttagaaatattttcatgcttcctctggagacattaga

SEQ ID NO: 34 - DNA, 584 bp, Rattus norvegicus
  Genbank Accession No. AA817825
  misc_feature (1)..(584): n = a or c or g or t
ttttttttttttttgctaatgctctgaaaacactttattacacaaattacattcagattctgaaaaatagtgttctaacagtgtaaccatctaaaaataagacatcccggaaacacaccaactgaggagaaatttaaaaaaagaatttaaatagagactttttaaaatttctctcattgcaatataatgttagtgattttaaaaaaatagaaggagatttagcagcttttcgtcgtgtggcaggttggttctcttcactgccacaggctgagaatgctgaacaggaaaggcaccaaagaaagacactggcgatgggtgtggactgggagaatactgtgttcaagcagagaatagggctatttacatccaccaactaaaacgtctccaaatgtgaatgagctaaacttccctcgggggttggagcgctaccttggaagaggagggcggcttctctacgctaagttcatataaagacaatggcactggagtgaactggtggggaactcctcacctagaaaacagaagccaacggagccaaatgaagtaaataaggtgtgtacagtcncacactgacgagtacagtt

SEQ ID NO: 35 - DNA, 404 bp, Rattus norvegicus
  Genbank Accession No. AA817977
tttttttttttttttttcaggactgagtactttattgtatcttaaaaaaataaatacactctaactaatatctgtgagtatcttctgagtcagaatccggcaggactcagttgtctgacaaggtctgaggcttgagtgaagcaggctggccagctagtcaagaaggctgaggtcgatgtggaagtacacgtaggggaaatagtcctggttgctgagctgcaggccagggatctccacggatgcatccagtatgcttgctgcagcaacttcatccaggtgccggaagaccgaattgagcacctctctcaggcgtttggtggcagactttttatggggctgcaggagcacagcctggaagttcactggaagtccatacctgagcacagactccacaaacactctca

SEQ ID NO: 36 - DNA, 465 bp, Rattus norvegicus
  Genbank Accession No. AA817994
tttttttttttttttctgaccagcatttttaatagacatctctaagccaggcaggggcagcctgatggtcccccagagtagagggcaatgcgctaggcacacctggctagctggggctggctacaggatggtgtacacaggagtatggcccccacggccaccctgggcacacaggggtacggggtgtccagctcaggggcaggtgacacagttcctgttggtgcaggggtcagggtggctcccactcttgctttgtttattcttgcggctccagccgaggatgggccagggtcgggtgtgtgcaggcgtcggagtctcaaaaccacattctctctggttccacagcagtgctggccgtcggggtcccgtgccacgtggttcggggccgggcagcaaggacacgacctgcaggctcacgccttcctcgcccatgctcctcagctgcgcctcgtgccgaattcttgg

SEQ ID NO: 37 - DNA, 321 bp, Rattus norvegicus
  Genbank Accession No. AA818069
  misc_feature (1)..(321): n = a or c or g or t
cggacgcgacgccatctttatcctggatcttggacttcacgttctcgatggtgtcactgggctccacctccagggtgatggtcttgccggtcagggtcttcacgaagatctgcatgccgcccctcaggcggaggaccaggtgcagggttgactctttctggatgttgtagtcagagagggtgcggccatcttccagctgcttgccggcaaagatgagcctctgctggtcaggggggatgccctctttatcctggatcttggccttcacgttctcgatggtgtcactgggctccacctctanggtgatggtcttgccggtca

SEQ ID NO: 38 - DNA, 525 bp, Rattus norvegicus
  Genbank Accession No. AA818089
ttttttttttttttttgattgtaaatttgttcagaattccttcaactttaattgtgggggtaaaatcaagcagccactgaggaaaaatagtccctggaagcagtcgaaacgtttgtgtagtggacacgatgagttatttattagcacaggttgtcacaagtcgccagctgttctcattcttccactgtctccttcttgccagtctcttgcccttcaaagagggggtacctggcctccacatcagcccaagtgatgttgccattggccagatcacggaccacactgggcagttcagagacctctgcccttatctgtctcatggagtctcggtccctcagagttgcagtgtggggggtcttgttcactgtatcaaagtcaatggtgatgccaaacgccacgccaatctcatcagttcttgcatatcgccttccaatagacccagaggaatcgtcaactttatgagacacgccatttcgagtcagagcttccgataattccttgacaaatggcataaactcttggttt

SEQ ID NO: 39 - DNA, 499 bp, Rattus norvegicus
  Genbank Accession No. AA818132
tttttttttttttttttccagggctggaaggctctttaattgcaagtgtatggtaattacatccttggatgtggtccttgctctcatgggagggaggaggaagcagatggacaaggtgaagagagaatttacacggttccctttgaagcatctaacaaaggacacagtttttggcaacccatttcacagtttgtcacttacaagagagctctctgaaaggaaatacaaactcaaagaaagcacatgcatcacacaggaaaaactccccatccaagaacaaaacaaaacctagaaacaaacaacaaaaccccttgtttttattccttccgatttgcttctctggagaaatctcacttttacacaaataagtactggctggaaagctgggctccgatttgcccagcactgaatatttatttcagtgccttttagaaggctagcatttgtacagagtgttggtctctgctagttcagaaggttcttactaaaacagaacctt

SEQ ID NO: 40 - DNA, 365 bp, Rattus norvegicus
  Genbank Accession No. AA818153
tttttttttttttccttagtatcaggagagctttgcattttttattacatttatttgtatgtggatacatgtgggtgtatgcatgccacatgtatgtagtggtcagggaacttgtggaaatagattctttcctcccactgcatgagtcttgggtttacactcaggtcattaggcttggcttcactgaattctgtccccaaattcaagtggcagaaacccagggctggaagcttcgtggtagagcactttcctgggatgtggaagatcatggagcccatgtccacaactacacacttcagtgatgagtacccaattagaggtttccaactttcctgacgctgcagctcctcattctgtggtgatct

SEQ ID NO: 41 - DNA, 529 bp, Rattus norvegicus
  Genbank Accession No. AA818197
tttttttttttttttatgttttaaggtgtagttttatttacaaagtgagatgacacaggtacaaacagtatctgataactccatgttcgtgaaaagtatataaatatattacaggaaattatatatagtaaacattagaaacggatacagtaaacattgctagtttctcttctatgccaatattactgtcattaaaagcttaaatactggcttcaagtatccccctataaaataaatctactttattaaaatactggaaaaattctgctataaacaggatttggtacattaaaaatagactcagtgtgtctttgtaacaacatccactatgatcaaatgctgtctccagccctaagacctgctttgtccggtccatgataaaggagttttcataaccattggaggtcaaagcggctgtaaaaacacagcatcttgacgttcgcatctgacgggagcgcttgtccttcaagctcgagggactaaacatggcggtgcggcttggccttgctgctctcgtggagtggagagc

SEQ ID NO: 42 - DNA, 461 bp, Rattus norvegicus
  Genbank Accession No. AA818224
ttttttttttttttcttatacacatgcttttttattcatatagatttctgagacaatactgtaatcttgaaaggaggttcacactattacatcaacagtgaatttcagacagaggcaaactgagcaccataatttacaaatagaaagaccatgctggaggacaacagaagttcactaagggtgcacaatgtatccgagaagttcttaagcctcatcctcgccctcctcctcctcgaactcgccctgctcatcagccgtggcatcctggtactgctggtactcagacaccaggtcattcatgttgctctctgcctcggtgaactccatctcgtccatgccctcgcccgtgtaccagtgcaggaaagccttgcgcctgaacatggcagtgaactgctccgagatgcgcttgaacagctcctggatggcggtgctgttgccaatgaaggtggctgacatcttga

SEQ ID NO: 43 - DNA, 551 bp, Rattus norvegicus
  Genbank Accession No. AA818355
tttttttttttttttttaaatgttactgtttttattctgtaacttatcatcattcagtggattttcaacaatatttcttttccttgttgttctttttaaagacgattttaagaccatgacattttaagatcatccgaaattaaagacacattgtaagccagctccttggtctcctggtccgtagcaaatagcaaactatcaaaaacaaatacagtttaaaaatgtttaaggtaacaattgttcccccaagcctcagaagttacatattataaatgtgtgtcacctggcagagagggagtgagaaaggagggattgggacatcatgcatgttaaatgttttaaggaagtgtgcatctactgggctggggagacggcttagtcagcacaagtaggtataagggcctgaatttggcacagtcaaaaacggttggttcgatggactgtggttataaccccagagctggctcactagctatcaagcctagtctaagctcctgcaagccccaggccagtcaaagatcctgtttcagtggaaagatggatgacgcctt

SEQ ID NO: 44 - DNA, 403 bp, Rattus norvegicus
  Genbank Accession No. AA818725
tttttttttttttttttgagagtttaaacgtttatttaaacagaaacgccacaccacttcatcctcatcctttccagcatcaggctaacaagaagctggctcttgagccagtgttggcacagaggatagacgcaggctatactgtaactcaaagcagcactactggaaggcttcaatcacccagcactgcatggagggcgagcaggacaatttacgaagatttagctagagagaccatttgagacatttctgctgtcttcacttttactaaacccagtggatggttgtgacttttgaactggtttttgtttgcatagctgtttggtagggaaaaaatcttatggctgtcgtaggcacaattctggaaagtacaaattgtctctaaggcacagaacttagattc

SEQ ID NO: 45 - DNA, 596 bp, Rattus norvegicus
  Genbank Accession No. AA818741
tttttttttttttttttgttgcctttattttatccctatttgaccatcaaatatgtttacagaagatggtttacaggtgcttgagcatcccactggattctctaccatttcaaggtgcaaaagaggcttacagtgtgtttcattaaacaaagcaaagctgcgacaaaacaggatcacatcaatagtagtatgcatcagaagagtgtagtaatccatcaaacacaattgggcatctgtgcctttcctcaaaaagaacaagagctctacactgaagaatatgtagtgcacaagaagcattgtttgtaggctgtgaaggaacataaactggcataatgtcacttattaattcaagtctcgatgacctatgacctctctgtgaatacaaaggggtccaatgtcttaggcacctgctcatgggactgtatgtttatttccagggtgcacagctccatacaaagacactaaagatgggtttggaacatggcagcatttacatatttgaaaaagttcaggcacattcggatacaaaagaaagggggggaaatgcaaatagaaatttctcttaagtctctgaaacacagtgcaaaattgagaca

SEQ ID NO: 46 - DNA, 544 bp, Rattus norvegicus
  Genbank Accession No. AA818747
tttttttttttttttttgggttttacattcgaatacagaactttattaggaaaaattgtaggtgaagatacatcatttttcattgatatgacttcaaagtagaaatggcctctcaaataactgtcatatattaaaaacgagaataagaaagcacacactgcgtataggaagctgccttctcctggaccattttcacattatctgggagacagaactgaaacaaaatacagtattcaccacatgcaacactgaaaccatcgctgcgtagacactgcaagctctgcggaggaatgacttctgtgaggaagcccctggtgacgccgccgagataatcacccatgagaagataaacagaactcgatggagaggcctaaaggcctcatgccaagtcccacagaggaatgcagccttttgctctccaaaccctccctcaaagccgaccaagcaatgaatcagaggggtctgccacctcggctgcacttccttcccactgtccccgaatagcaagcagcacagtgtaaacacaaggtacaaatctgggttt

SEQ ID NO: 47 - DNA, 368 bp, Rattus norvegicus
  Genbank Accession No. AA818761
tttttttttttttttttacaccgatggacgttccctttcctagctgacattgtaaaactccaggtagttgggagttaaacacaacccaccgtgggaaaagtaaacagactttcttaaattcgctggtaaaaaattctatcttgcccgaagaggtcgtgtctaagacagcaaatgagaccacccacccaccctttccgcggtagtccacgccaggcgatcagtctaggctgaccagtcccggggtctccagccacttcaatcaactctgatcgcagcaagatttgatttgttcagttctggatctcagccgaaggccggctcgcccacagcagcctgtgggggcgaggtgactcaagtcacttcccagt

SEQ ID NO: 48 - DNA, 479 bp, Rattus norvegicus
  Genbank Accession No. AA818875
  misc_feature (1)..(479): n = a or c or g or t
tttttttttttttgcttaattcttttattggaaaaaaatgtatcttaaaagtccatcatcaactttttaatataaattatgactcaaactcattccaatcaccttgttaagtggtggcagcagacatactagagaaggtagctcgaggcagaagagcatcagcaggaaggactgctcaaaaaactaacgcacaactggagctcagggtcacccacactatgtccaaccttttgccaatggccttcctgggagcatgctgccaggggacacaggtcctccagcaagtattcacgtagcctccaattaataagctcctctagggctatgaggtgaactcccttagggaggcangcctgactgaaaccgcacggaggcaaactccgagtggacatccgtgaccagtcttagagcctgagacaccagagtgcagagctttggacaaatgaaagtctcagtcactagaccgggggtaactggac

SEQ ID NO: 49 - DNA, 582 bp, Rattus norvegicus
  Genbank Accession No. AA818907
  misc_feature (1)..(582): n = a or c or g or t
tttttttttttttttttgaaatttgaagtctttattgaaccaattgcatgttaggttacaaagctatttcacttttccaaaatgctgtttctctttgtagaccaatctggccacaaaaggctacctggctaagtattagccagaaacttctaaatcccagtgtgatcttcttgtggcatttttccaacaaataatgcagaccaaatcacaagatggccacctcactggtcacatggtccttaggttaatgagcagaggctgacaggctgtctcctcactcttccaagaaccgcccccaagtgcacacaggccctgcttcgtctcctcatcggcccatcttctggtctccttcctcaccacaatcttcacctgaacagcagtcaaaaggcgcggtcggtaggccgcggaattatcactgcgcatgcgaccattagggtccgtgcttctactgccgaaatggagaatcccggttccttagcagcaggctccgtatcccgcggccactgaggaaccatccggggatgcagaccgagtacggtgggctggagaactgggagaatggggggcggngggcaagactgg

SEQ ID NO: 50 - DNA, 582 bp, Rattus norvegicus
  Genbank Accession No. AA818998
  misc_feature (1)..(582): n = a or c or g or t
tttttttttttttttttgatgttttatatatattgtgtttaatctgataaagtatatgatccatgtataatgatgtatttaacatatctatgaagcacccaacagaggggcagctacttccttaagacattataaggagaattcacttgctgatcactgaaggaaaggcaatagacagaggggaataggcacagtagtcagaaaacatactctccctattgctagtaagggtagcagaagtttccaaattttgtactatggtttctaggaggagccatttggagcagatgataaaggaatgttacataaatcctagaaatatgaaggggctaaattacatgagtccagtaccgaagggtataggcctgcttcaaactcaggaacttaagggaagtctangagcaatctgacaaaaaggagttatggagatctgttggccattcacactgcttccccagagcacagacagcagctctcttttgcagctggctgccatttattctctcttttcaatcaccttcactctttgctcaacatccaattacatcccccggcccaaccgacatcatcttgtgtttgagt

SEQ ID NO: 51 - DNA, 188 bp, Rattus norvegicus
  Genbank Accession No. AA819021
tttttttttttttttttagaacatcaggcatttttaatccatctttacaggttacctagaccacttttgagtaagacaactgtagacagttagtaactgccacgatttaggacgccagttggtggcacgtgtcaagttccacagagtcctgccttgccgggtgtctgaatgtacagctcggggtcact

SEQ ID NO: 52 - DNA, 281 bp, Rattus norvegicus
  Genbank Accession No. AA819111
tttttttttttttttttagcattagcaatttgttttattttttccttttctgttgcataggaaatgcagtacttgcttccagtaattgtattgtgatgtgagaaggtggtagcactaacggttgaatacaagagttaaactaatccacaccagctcaaaaaccctgtggagacttagttgataagaatggacgcccacagtgattctcaaccaattacaagttttcacagaacacagtaaacgaaaagggtaactatgagagtcagtacaaatatgctaga

SEQ ID NO: 53 - DNA, 473 bp, Rattus norvegicus
  Genbank Accession No. AA819179
  misc_feature (1)..(473): n = a or c or g or t
tttttttttttttttttgattgaatttcgtatattcagactttgaacacaggatgggatcacaggcctgccaccagcgagagcaagtggttcgaggagcacggataagtacagagatggaaacaggcggagccttctcaagaacctcaagcctaaactgctccggaatctaaaacctcttgtacagcgccatgacgccagccgtcaatcccacgcctgaactcttgggatggcttacaattggtattgcagacattgtcttcctgtggacagggtatatataaaacataaatggacttcatgtttagacttgcatcctctctcccgagatacctcattatgtgttcaccaatagtctaatgtcttataaaaaacagttctggtcncaaacatttgaagccatcatggtacttctaaaaatttcaagtgtctgaaggtcggaagccagatgcaaattccatgatccactttggt

SEQ ID NO: 54 - DNA, 513 bp, Rattus norvegicus
  Genbank Accession No. AA819362
tttttttttttttttttgctttctcctattttatttaggtctctctcttttttttttttcaaattccaaccagaagctaaatacaaatggaaaccagtaagcactagttttacttcaagagtaggatcattccgatttactccagtaaaagtatgcaacccttaagcaaagcttttcttcatttaaaagaaaaacaaaacaaagtaaaagctatacagtagtctttcctcatattcattgcacaaacgagttctgcttccagaactctccacactctgtaggtatttttacaatgtaagagccccacttttgttttctatcccaaacactcaacttctttaggatggtgtagaaaccaggatttctgcaaaattcactggattttttatttgtaattaaaatttctaacaccaaaaaacaaaacaaaaaccaaaaaagtcctctacttatgatggtttttgcagctatgactgttcctcggttttgtagctgcttcagccacaccagactcca

SEQ ID NO: 55 - DNA, 308 bp, Rattus norvegicus
  Genbank Accession No. AA819403
tttttttttttttttttgaatgcataaattcctttattgaaaatattggagtagcactgcattacatgtagttggtatccataatgaagggccacacattcctgttcagacaatactgttttaaatagagaacacagcatctggaaatgctctcacgagtacagcatcacggactaaactaggtaagagtaatctacagggcaaaatgaccatcttgttcatcaacagcgtatggttacagacggtctaaacggtgaacaaaatcaccacgtgacattcctgggatctcgccaatcatcctcgtgccg

SEQ ID NO: 56 - DNA, 477 bp, Rattus norvegicus
  Genbank Accession No. AA819471
tttttttttttttttttaacagtactgagtacttttattacacagactttaatagcttcagctggaaccagactaaacttagcacagtagattgctttcaattgtatattcttccttgttaacatattatggaacaaaaaccataattccatgcaccaatggtctttcctctaaaggtgccagagcctgagataagggttcgcctgaaggaaggagcatttagtcccacttggatgtttttctcctcatgtaccgatgcccttcactgtcaatggcttcatagaggtcctttttgttctcttgcgttgcatgcagataaccaatgtaagccacacagagtgaaagggctaccaatccaaaagccatcacaggtttgttaggtttaatgaagagctcaggattcacagctcgaaacaaggttgttgggtgcgtccctcggaggcctgggttttcaaagtttcctcgtgccgaattctt

SEQ ID NO: 57 - DNA, 145 bp, Rattus norvegicus
  Genbank Accession No. AA819776
tttttttttttttttttctcttccttttcttcagcctgatcaacattgacttccttgtcacgttccttctccacacatagagtcatggggtagccaataaactgggaatgtttcttcacaatttcttttattctcggttcctcca

SEQ ID NO: 58 - DNA, 675 bp, Rattus norvegicus
  Genbank Accession No. AA848315
  misc_feature (1)..(675): n = a or c or g or t
tgaaaaattcaaggcatatactggatctgttttcagaagagccgtttctcatacgaatggaggccgtgaacgccaccttccacctgagctgaggacgttctcttctcaaatttaagttcccccgagtacatcatggctctgacttgggttaagctcttggcaccaatgtcctgacaggaatgctggatgccagcaatcaaataagggacaaacttgtggatagaccctttgtcctgcactgcccctgaaactccttgggccactttgatcttgtcagcttcactgaaatatcggttctggctgctgaggtgtttgtccatggcatcaagagagcccataccacgatacttcttcagccggatcccatcggagaagaagtactcaccaggggcctcagtggtggcagccaagagggagcccatcatgactgtagaggccccaagagccaaagctttggcaatatgacccacattctggattcctccatcagcaataacagggacaccgaagcgacgggcatactcagagaccttgtatactgctgttgcttggggtcgcccacaggccaacacttcctgngtgatgcagatggaaccacttcccatgccgactcgcagagcgtccacacctgcgtcgatgaggttcttggcttgagcagcagtgactacattgcct

SEQ ID NO: 59 - DNA, 574 bp, Rattus norvegicus
  Genbank Accession No. AA848389
  misc_feature (1)..(574): n = a or c or g or t
tctcgctgcccttggttattctaaggatgacattccttcactggtgaaaggaacactgccccaggaaagggtcacgaagcttgcgccgcgtgcccagtcagaggaagatttgtctgctttgttcgaagcatcaatgaaactgtactaattaacagattaatgaaaagaatcgccatcggcccttacaacggaagctatgagagcagaagttggtcagggctggcctttgccgtcttatctccacacttaattccactgttactggcttgaatgtgacgtgattttatccttcgggggattcctttgtgctcattatgtaagaccccaggagtcagtgtccctgcaccaaaccccatcaaatacagaaatatgcctctgtccagacactgcttgtctagaaattcaccctgaagaaatactagcattagtatgcaaaaaacatgacaagggtgtatctgacagtatgggtagcaaaaattaaaacaatctgaatcttccttcctaaatgaatcctaatatagtcagtaatagaatactgtggtgttgttaataaagatgaagccaaactcttgan

SEQ ID NO: 60 - DNA, 564 bp, Rattus norvegicus
  Genbank Accession No. AA848437
caaacaatagacatttatttttcacttctcaggaggttgaaagcccaaactgctatcaggtttggtttcccagtgcctctccttggctggttggcagctgccttccggctgccatcctctctcggggtgtgaacaaaccctcggggcatcttccgtgtcctttaagtcagatagaagtatgagcctgccctaagaacctcattcgacctcaatcacacccttaaagtactatctccaaaaacacttacttagcatttggggcttccacacctgaactttagaatccagcccatagcaaggaccccacattgtctttctgccatccctctacttgctacgcaccatgattctcagacaggaatgctgtaaacccgatcccatagtttgtaaatatctgttaaatgactagatccatttaagtcgagctttgggcttcagagtagtaagagcctttggcctacacagaatgcaaagtctggaagagaaacaccattttccagctctgaggtctcccatcttctcattgatagttacttggatacggagaatctcccagagtctgag

SEQ ID NO: 61 - DNA, 501 bp, Rattus norvegicus
  Genbank Accession No. AA848496
ggatagaggtttgatttgctcttgaatgttccagggtggagacaaggagaaagcacaggtgtggaggtctactcagtgcagtcgtctccctcatcctcatcctcaccgtccacagacagagcagcgtacttgcttgcagaactgaacttagaggctcggttctcctcagatttctttggctcaggtgcagatctggagtcttgatcttttttgccgtccttcctatccaactccttccagtggtctctgctccctccatccccaggaccacggctggagtgtccagtctggcctttggtggtgctcaccccatccactttagtttcatctttccttgatggtccttcctcagagggctgagctggagcaactttccctccaccacttgtaggggacggctgctctgtgtctgagctctgagatcgagcaggagggttagagcttcgcttcacccacgcattctcctttggtggaggggctggcattacctttagaggctgg

SEQ ID NO: 62 - DNA, 568 bp, Rattus norvegicus
  Genbank Accession No. AA848689
acatataagtattattaaatgccgttttaaaatcatctagttgaaattttaagctaatatgcattaaaacaagatgctgcctaaatatgctgtcttagggggagacttcgctggcagtcggctcgggcttcacttgtatattgagcacatagtcatggcggaaggatgaacggacagtgcgattcatcagaggttgaagtgggcggaagttgtccaccattcttttctctttctctccctcagatgtgaaaagcagggtccgaaactgttcaagctgatcatggtcgacctcaactggctgcttcttaatgatccaggtaacagactctgagaggggaggcgtagtgagagatccagaataggtccagtaatctgggcaagtaggcatcagacaggaagggtcaaatgatccaaatttcaccagggtatccttgtgcttaattgatggcaaagtgtccaccaatttctgcagttctttatgatgtttacctagctttaaaaatacacctatcacagccaagccattttcttccagtgctgcatcctcaaaaacttcaaatttgactgc

SEQ ID NO: 63 - DNA, 340 bp, Rattus norvegicus
  Genbank Accession No. AA848738
caggtgtgcaagctggtggtggggttttattaggggttgtggccagacagcaccaacattacatctggggacggccctagaccctcatcgtaggtaggtcagggaggaccaactgggttctggggtcacttagatgaggttgctttctttccgtgtcactgtgtgccctcctctgctttagtctcctcttcatttaaaagccatttagagctctgccagaagctgtttgcctggtgacaatctcaggccccgggagatgccttttgctttcccagtttctgagcttgggtggacggaagcctgatgggtatctgcgtccacctagagctgtaagccagag

SEQ ID NO: 64 - DNA, 582 bp, Rattus norvegicus
  Genbank Accession No. AA848948
  misc_feature (1)..(582): n = a or c or g or t
caaacaaatactttttataagaaaaattccctttaaatatttatatacatgttaccacgtaatactgttaatcaaacccatggtttatttgtttaaataagattaaataaattgcctagatcttttaaatcaaaccttagtatggtataatggatatatgggttccttagacaacaataagaagcatgtgttcttgtctctagatcaaggagagctttatcaagtggtaagcgctgtgtgatggtgcagaagtctaagttttgaaaacaaactcattcagaagatctgctgctcaaatagtattttttcaaaaccaggtggaggagtatgataaaattcactgaactggcaatccaaaattgcactgtcgtcaacatacacgactggatacacggtccctcgtatacctgatgctggacaatgcatgtttttcccattcaaatatacatttaattctacatggtcatatgttatacccactacatctccctcctgaggaaggctgtttgctggcagcctgtttttctcttcgttgttgtggtacaaggctccatcatttctcatcnacaggctatgcatgtc

SEQ ID NO: 65 - DNA, 554 bp, Rattus norvegicus
  Genbank Accession No. AA849030
aaaggaaaaaaataacagtcaaactttattccaaggtctgcaaacattcagactaatcaaagtggtactgtaatttcttataatacatcaataatacagtttttgaagtctagagaattaactaagccctaaaccacatgccatataattccaaagtaacaactgttaacaatgtgacattagccatgaacattacttaatgaggacataattaacaagctattcttacttaaggcttccttttagtatggaatttccaacatcaaaaattctattttgaaggctaaggaggttgctcagtcatagaacacattcacagggctgccccagcaaatctctcgccattcaacaactaattcaacgcactgatgagcccaaagcaattggtcgcccaatgtcaaccttctgccagcataggcaactcaagccaattcagtgagaaaccaggagatataaagatacgcggctaaaactttctccacttctgaagctgcaaaggctttagatgagtattaaattatatttaagtacttggtcatagagaactatttttc

SEQ ID NO: 66 - DNA, 401 bp, Rattus norvegicus
  Genbank Accession No. AA849222
gtgtgatctgcctggaggagctgcttcagggggacacgatagccaggctgccttgcctgtgcatctatcacaaaagcttcatagactcatggtttgaagtgaacagatcttgtccagaacaccctgctgattgacccttctgggcctgcttacggactcctctcaaagggacagccagcccctgttcctgggaggaggctcctcggacactggacagagctgagcttgggacaccagagagaacagggcacccttctgcactggcttccagaaaacggtcctccccgaggacacccagtggatgagagcgagtctgagagaagaatgaattgacctctatccttcccctcaccctcgacccaggagggaaagggcattttctttttcacctttgaaaggcg

SEQ ID NO: 67 - DNA, 535 bp, Rattus norvegicus
  Genbank Accession No. AA849497
  misc_feature (1)..(535): n = a or c or g or t
gagttcataaactttattcctacaacagtgggtctttagcacaaaaagtacaagaaaagagagtttcgcctacaagtgcctctcatgggcagggttctgttcctggtgcagactaggaatgttaactcccttggttctaggaccagcatatcttaatctttcaacgaagcagatgatatggaagtcctctggagactgaagccacttgcctagtctcttgagcaaatgaacagacactgctatcatttgacaaggaattcagactcagaacagagacaacaaagtattttaaaaaataattattcatagacttgctaactgtcacttataaaggctagtgcaggcccanagtaagaactggtgctttctgagaaagctgaaaaaggattagaggtgccgcctgcttctaggtacgccctcacttacactctgcatagctaactctggttaaggacatggtgttcaagtctctgttctgggcttggagatctctgtagcctaagagagtatcagtgcatggttgacctgagccctg

SEQ ID NO: 68 - DNA, 550 bp, Rattus norvegicus
  Genbank Accession No. AA849786
tggggtagacaccacctggttacgtcattctgccccccatccgactccacatgaggggcagatgaggttgaagagtgtaagtagtagtatatacatggcaggggttgaatcgataggtacaagttctgtcatatttacactatttcacatattcacaggtataaaggagccaggggctggagagggggcgagttctggctctgttctcttatataaaaaagcaccagtgtcctggactggacacccactgctacacagggagcagggggcccaaagcctgattgtcaccgactgatatcccgactggagtcccacaacttggtgttgggtggctcagtccgaaggcaggcgaagaaagggtgctgaagggcttcacctaaggtcagccgcttagcaggttcatactcaagcatgttttcaatcagatcgaagagctggtggtggtcctctgcctctgaggtcagataccgccgtagtggtttgcagttctcacggacgtagcgcccagctgaggtgttctcatcccaatccaggcgaccccgataaaaat

SEQ ID NO: 69 - DNA, 459 bp, Rattus norvegicus
  Genbank Accession No. AA849939
acatcaatatcaacaacactactgatgaggactgaatgtataaggttggggctctcttgcaggaacctcagaattcaaaaagcagtttctaaggaagcaatgtggggaaaaatctacatctgaagtatttctgaaataaaaactgaaggccaagaaatcaaatttctggttgcgagatgacaaaacatctttctctttctgtttctctctctcaggatgcacaggtaggtatgcacaaacacacacacacacacacacacctatacacttcagaaaacaaggaaggtatcttaataaattatctggattcatatatgttattttagtctgtttcacttggaaaaacagaacaaaaacaaatgaatacaaaaccccaaaacacagaagctaccagttgagagtcacagactgatttccaactggcagtgtaatcttccaacaggaaaataacacctgtgt

SEQ ID NO: 70 - DNA, 590 bp, Rattus norvegicus
  Genbank Accession No. AA849966
aaattcaattggctattagaactattaatgattctcaaatgttacatgccattgttgtagtttttaaccaaagcattaaagaagtgaaaataccagagaataagacttttcagactggattgactgggaaaggcttggataaaagttaaaataatcattgataatttcaaatcaagtggccctatggaatagtaattcttcatgatggagtccacaattggtcaatgaagaaagcttgttgcagatgattgagagcgatggagagatagaactgcgtcctaggaagggagtcctggacacctcacttctctggggacctgtcacctgcctccttccttcgaaggaggatgaatatggactccactgtaccatcaccgctctgctgtgaaaagcagaggaaggtggcccagaggaaaccacaaagtcccgtgtatgctgtcctccagttcacagggacaaggctgaagttggtcagcttatatgtattccagaatttctgcctcaggtccaaaaatatgtcatcctttccctggagaatgctcataccgacgtagaaggcaaagagggctactggccctccgacagtctga

SEQ ID NO: 71 - DNA, 419 bp, Rattus norvegicus
  Genbank Accession No. AA850195
cccaacacaaacgggctttatttcaaccagacaagtgagttcttccattagcatcagcttcttcaaggctcaagggtatggaaaagaagggcggtgctccacaaggtagagaggcgaagactgaccaaggagtaactctattgcctttcaaaaagcccttggaagggtaccctcaatccaaaagaccattagctctcctgttacagtttgtgtacaacaccctcatttgaaagtgacgcgtctatcttaacgaaaacatcccagaatgtccatagatgtgagtgtatcataaattatatctacgttttagaaatggaataaagtaccaatctcagtttaaatactaaaatagaaataaaaaacaaaaaaacaggctttaacgttattacttgggatgtctcgttacacccttcctaggt

SEQ ID NO: 72 - DNA, 486 bp, Rattus norvegicus
  Genbank Accession No. AA850292
aatgacagattttcctaaaagaaaccactataacatctttccaagtactccaagggaaaagaaaaagcacacaaagattagaagtctagtactttaacagcacgctgccaaacacagactaggataaatgccaggagatcttaaaaaaacaactctgagagatgcaatgttcaagtcaatcaaacatgtaggttccacgaacaacagaaacacaggtccacgagcagttcactcatgcacgattgtaactcactgtacttcatcaaagctcatcgaggcgcttaatcctaatgactgtctcaacagaggtgcttttctctttgcatggggatgttgtacacagacaagagaggggaaaaagtcttccagatgaatacataagtacaaccagcttcgttctcctttgataaagtactgaaggcagatttagtggactcaagcgttatcagtttccttaatgagcaatcttatgcatgctaaaaagag

SEQ ID NO: 73 - DNA, 428 bp, Rattus norvegicus
  Genbank Accession No. AA850364
gccagtgctgtgcatgacagccgctgccactgcaggagagcgagtggaggatagctcagcctgtgcttccgagggtccccagcccaagctacatcttcaagagtctgctggctctttgtccattcatgttctctgtcgaagatggcttgtgggtgagctctggaggctaccagaagttgctttcctttgtaataaccgcttgccaaagctgctgggaactgtcaggggaagagaagggacatcaatgcaaggaaaaatgtagagatgagccaagagaaaaatgagcccaaggtactaagtctcagtgaggtggcgctggagacagagtctggaagggtggctgggatggatggtcctttccatctgtggctgggcagagccaggtttctctctcgtgattcgaggactctgaaacccctgtcctgaga

SEQ ID NO: 74 - DNA, 496 bp, Rattus norvegicus
  Genbank Accession No. AA850916
caggatacaggcaagctgtcgtgggttttagagaagactatttaagtgagaaggtggtcgctatgacaactgcagaaacaactgtagtttctcaaagctgactcctgctggttctctgaggaaatgcaggtagaagctgatctgtgtatgccacagcattgactagatatctaatagggtctcttctcctggaggcatcgtagcctgggactccttagctacaagggacgctgccccaggtaggacctaagtactctctcatttcccagggcctggttaacccacgggcaatagggacctaccaagatcacttgtctattccaaccctgactttattccatcctgaccctagcttcccctagccttcctaaggggctctagatcaccctgatatgtgggtaaatctattaattatccccaaatcgcatcatcccttacctttaacaacatcctggtacttttttccccacctacatatatgcgtgcctcatcaaac

SEQ ID NO: 75 - DNA, 423 bp, Rattus norvegicus
  Genbank Accession No. AA851017
tttaggttcacttctaagttatgtaaaatatgtaatgtcacaactgagaatgactttctgattccgtcaattttttgtaacacatgccttatcacgatgcgtcaataccctgtgggacagtaggtcttcctgggacagctgatggtgaaaggaaggctgcagctcgttgtgagctggctacgactaggagttagtcacagaaggttcaagttaagccatgtcttcccagctttaggtcctacgcagctcctcactgagagcttcttggcagtgaactgtattatgtccttaggtttctccagcacatcatccacatctttccccgatggctcagacgcactatcctccactgattggtgggatgatggcaacttcgtctccaggctgaagcaggagttgttgatctccaagctcgacatactc

SEQ ID NO: 76 - DNA, 526 bp, Rattus norvegicus
  Genbank Accession No. AA851214
  misc_feature (1)..(526): n = a or c or g or t
gttgaagtttttaaatgttatttatacctgttacattcactctcaccctcaatactgatgacagatgtcagaggcaaaacccagcacaaacatgaagaccacaacactgagcatccctgtgctttcagatacagtaagcattcagtgtacagtagtccttccttcacactttagtaagacgctgatgcagtgcagcagtctgcaaagcactttcacacagtccgtgcagaagacatctgattttttttaaagttctgtgatacaaatgattaaaataaatccaggatgaacaagtttcaaaacgcatagtgttctgtgcatgagtccattttctttaaactctgaaagaaaagtggtaagaaaacaagaaaagaaaatagctgctgcattctctggtcttctccattgctggtcaatgctcttatttactctggcatgtaaggacggatgtgatcctctatggtgccaactgcccagtgggtgagctgttcctgcggcaggtanaggcagatgctgcataacttga

SEQ ID NO: 77 - DNA, 541 bp, Rattus norvegicus
  Genbank Accession No. AA851261
cgctggccatcaggtttattagaaaaaggttatcgtgtggttatttgtcctttgaacttctgggctcagcctttgctccaagctccctcccatggtggagccctggctctgcatattcacagacggggcagccatatcagactgcaaagccacacaacagagtctcaggcagttgggagagccaggcccactgcttctgtctagatggtttgcagagcagacactggggatgacactacagcctcctcagcagctagccagtctgctttgcctgcagggcttacgatgtcaccttttctttacaaacttctttctggaagcattgggatttaagcgtctcctcccaacacccaacatgctgtcccggacttgcaggatggctgagcggctggagatgtcattctctgcgaagggagaaaccccagctatgtactcgggggcaaacacgttggtcttctgcctggccttgtgggagagtcgcagctgagggaagcgctgatcctcggtcaggtgggggttgacggcatatttgccccctttt

SEQ ID NO: 78 - DNA, 534 bp, Rattus norvegicus
  Genbank Accession No. AA851417
  misc_feature (1)..(534): n = a or c or g or t
ggagacaatgaaactttatttaaaaaccaaaccacttgngaaaatatattgcaggcttaacacagcaaacagacaaatgtatcactgtttcaagtaattaaattggtataaatacaatatagtactcatccaatagataaggtgccacattgggccagcaacactgcactgcaaaacccccagtaaaaatggcatttggtaagaaggtgtgtgcttctcctgctgtagtggccctagctttccttggcccaagttgcttacttttaggcctccttgtggctacaaggctctgtaaattcagagctgattaatactgggtttgcacttttattttgtgaacccaaggccaatacttctcaacagctcctgtttattctagcgactggcgtgtgagtgacaaccaaccccacttgcttttcgtgaggatgtgtcacttcggtgtacaagtcagtgaagaaagctgtttcccatgtacactgtgacactgtctggcttttctggggtttctagaataatagaatttgaagaaatgga

SEQ ID NO: 79 - DNA, 454 bp, Rattus norvegicus
  Genbank Accession No. AA858573
tttttttttttttttttacaggaaggggaagatctttattgcaaagtggagcttatcaaaggaaaaagacacaattctccatgtccttcatttcagcttctgcttctctttctttcatggaatctccaggatgtcactcaaagccagaattgactcttgctctgcgttggaggttcaggaaccttctatgggcaggaggatgtcccctcctcgtgatctctttgggttcatcataaagaaagccaagtagataatcatttcttcgtcggtgggatcttgccatgtccccaaaaatcatcacagagtagcccctttggaaggcgcaggtggagggatcaccagactctcttaggcatgtagtttcctgaacggtgaactctaagttcatgaccagtgtgtcttcatccaggacattaactctcttcagggagctccgcgtcgcccgaaacaggta

SEQ ID NO: 80 - DNA, 410 bp, Rattus norvegicus
  Genbank Accession No. AA858590
tttttttttttttttttgcagatacaaagccgtatttatacatttatttatatgtctattcacttacgaagaggaccatttgggggacaggaagcaagtaggctgggtggcacctccctgccttcctcagagtcagagtgagtacatgataaataggagtcagagccatggagaaaagggagttaaccagaagggagacgctctatgaacacgcaggctgctaaggggtacagcatgggcagggatctgtgctgcgggccctatatacagcttaaagcgagggggagattagcccagtggctataggaacagcagaaggaagagaggaagggagtgccagctaggctgtcagcttccagcctgtggcccttacaccttcccctaagcccttctacatttggggcttaagg

SEQ ID NO: 81 - DNA, 522 bp, Rattus norvegicus
  Genbank Accession No. AA858636
tttttttttttttttttggcagtcaaaacactttattggcagaataaaaaagtgcagcatgggaagtattgacctgccagacatttagctcctcatattcatccagagctgcctggaactgggctggtgtgaagccacgtgatatgcagcgctgttcagcctcagaaaagcggacactccgtccccctgataccaactcacggacggtagcaaatatcacatctgctggcctctgggtcctagccgtttgtcccttttcacccagaagggagtcctttgacatctccatcaaccttatggcttcattcacatcttccttctccacaatgtctaccatccgaaggcgagccagagcagtagaaagtcggagaatggccagcagggtccgggcagaagtgtaggtggcatccttactggcccgggcctctcgcctcatctccacatacgctgcagtgatgtagtcagccagagagtcaggcactgtgggctgcctctcgcggcacatggcaatgtaccgtctca

SEQ ID NO: 82 - DNA, 275 bp, Rattus norvegicus
  Genbank Accession No. AA858674
tttttttttttttttttcaaacaggaaattctttattgcaaagatacaaaagcagtcacggggacatgtacagcaataaattaggtgggggccatgaggcagggtgcaaacggggccaaaagtctgtgatcttgatcccttcccaataatttataacatgggggaaaaaaagcacaaaaaaaaaataaatattgaaatgaaattgccaagtggaaggcggctgaggatgccaggcctcggaatgatcggcatgtgtccctgaaaccctcgtgccg

SEQ ID NO: 83 - DNA, 515 bp, Rattus norvegicus
  Genbank Accession No. AA858816
tttttttttttttttttggattgacagttgtttactgacagagaacagcaggctggagaggctccaagtgaagggggagacttttgggaagactggagtctgaagttggaggagtccacagttgcaagagtgtacggggtcagctctggtccatcttgccggggtgagtgggatcttcacccccttctggggtggcaggtggttcagccacctccagaatcagttccaaggcaccgtcaccgcacacccggcgtacctcctctcctctggctgctaggatctcttcaatgttcctcttccccttcaggtcagagaaccagcttaggttgtctgcgatgatgtggtggttctggcaaccagggcaagtcacgatgaccacaccctggtgataggccaactttgagatgtgcttggatgaccgagtcccacagaccttgcaggtgtagacgagctggtagtggtccgctttcacgcgccctaacgccgccgcatgctctgattccggcgcggagctc

SEQ ID NO: 84 - DNA, 515 bp, Rattus norvegicus
  Genbank Accession No. AA858892
  misc_feature (1)..(515): n = a or c or g or t
tttttttttttttatttgtaattcaatacttttttttcctttaattcatactgaacttccatggctctagctactttacattaagatttggctggacagccttgtatgtgtctaggtactagcaataagtttttggaccttgcgcacagcgccaggcaaagtacagttatagatccaaatatagacggtcagacaacccaactgcaaccaaactgtgttctttcccactgtggcccagtgcaggtgttgggtgctgctccctctgcctcacccgactccaccccatgtcaggattatccagggggccactatggcctctgatccatccctccccacctcagaatgtaggttgagtggggtcgggggaagcaccatgggtttgggaaaatggtctggtccatgcagagagtggtctggccctagagtgcaaggtanggagatgtggggtgccacacattcttgttggcaaaagtgactgttttactgtgcagtctctgcacacaacacagaagccc

SEQ ID NO: 85 - DNA, 511 bp, Rattus norvegicus
  Genbank Accession No. AA858953
tttttttttttttttttggtttttagcgactgttcgtttattggttagtgggagtacagcccatcggaacacacgacatgcatttgggggagagcaactgtgcactgcagccgctgtaaacctgctgagtgtgcgagcagcgcagacggcacccacggaaaaggcagggatgacttagctgtctacggtggctaagtgcaaagtctttgggaacagatttactttttgttactcaggaattacatcaaagaggaaagccctaactgccccccgttcttaaactaaaggctaagggggttggaatcatttgataacccaccatccaaatcacgttcattgcaaactgtaatccaattccccttcattaagttttccctgtcaacccatacccctcaggattatacacactgtatgagttcagaaaagattaatgtgaatgtaaggggtatgtattcgactccagcatctttgtcacatagccaatttcttttaaatgtctgctataacagat

SEQ ID NO: 86 - DNA, 353 bp, Rattus norvegicus
  Genbank Accession No. AA859085
tttttttttttttttatcaaatactctttaattttattaactcttggaaaatattccaaggaaataattgaaaatacagaaatattttgttagtacaaagacattacctcaactgtcctcttagtgaaaactgaatatggtctgcgtgatctattagggcaatagtaaaaataaatgtctgtgttacataagagctttgcataaaaatccctgtattgtgtgtaatgtatgatatcgtgtacgcgatgtgtgatataaaagttagcaaaatgaaaaataaaacagcctttgtggattaggcagaaaaatatcaaacccgatgccttttccttatttcagtgacacgtgggaag

SEQ ID NO: 87 - DNA, 147 bp, Rattus norvegicus
  Genbank Accession No. AA859114
tttttttttttttttttgggttttaatttaattttatttttgtcacatgggcagtataggatggtgttagcccatccttactccgcttgcattgactgtgcctcgggtcttaagacgctaaagtgtcatttagaactcactcccaga

SEQ ID NO: 88 - DNA, 550 bp, Rattus norvegicus
  Genbank Accession No. AA859241
cggcagcaaaggttttttggccttttttttcaagttcaacaggtctttattgaatgtcatagttcaagaggcaaatctggacacactggtatcagtgagcttgaaacaggatcactgatgcattggtgatgataattcctagcaaatgtgattgatttttacttgatttccaagtagctctcaggcatctaacctgtgaaacagtgactgtttacatacagggatgcaaggggacataagaatcagagcagaaaggaaacaacataaggtacttcacgaaaataatgttccaagaactgaaaagcctcgaaggtgtacaagaatccagtaataacaaactcatgttcaagcaggattagaaacacagcgttaaaactggactcagtgccgtgtcttcacgtgcaaacctgccaacactgaagaggatcatcccattttcctgtgactagtcaatacattacgaagttcttttgcaaatcactctgctgacaagtaacaaaactgcactgaaagcctttactagtcctcttcccctccctttctcccgtgt

SEQ ID NO: 89 - DNA, 558 bp, Rattus norvegicus
  Genbank Accession No. AA859348
tttttttttttttttttaaggatcatcctactgctaagtcagtgtctcctcttgattctagtgttttggccacgcctcaccaaatgtctgcaatgatccagtactcacaacatgttcaggaggagctgggtcagattttgacagagggtatgggaagggaaaggggagaagaaatcgacatttattttattatttattttaaatgtttacatttctttgtgttgttccaagcctgaatagaaacagatagcattaaaggactctgttcccaccccttctctgtctctctctcccccacttgtgctaacttaggataacactctctatttcgttttgtttctaaagtgatttgtggacttgtgccgtgtgaactgcattaaaaaggttctgttttcaaagatcgattgtcgttcctgtggggacagtggctcctaagaaatctgcattgtaggagaagacaatgaaagaccctggccctgtctctcaaaacttaactctctgtatgatttaaaaaaaaattccatttactttactttgtggttacttgattttgaggaa

SEQ ID NO: 90 - DNA, 548 bp, Rattus norvegicus
  Genbank Accession No. AA859536
tttttttttttttttttactttttaattgtttaactttattactgtcgcaccatttatacaattacatataatttcaatgcatccattgtacattttttttattttttgttttttttttttattttccattttccaatgggtggtgtgttggtgtctgagacacaggtggaagaaactggagctgcaatgaaggcagacttttttatttttcatttccactgaccaataaacagaactacaggtgcacccaaccacggacatgcattaactcgtcatgagaaatctaggtaggctaagtatgatgagagaatgtttgtcactcccaaaaatatctggagaggaagaatgtagggttggcattgagatacaatgtggacaagctaagtgggctccgtctgaaagttggcattcatccacaaacgttaaaaaaataccaaaataagaaaaggctgtaaattaataaggaaacacagaaaatactgctttcataaagatctgattgccttggcactggccctgtgggcagaatcaaacgcctccctcccca

SEQ ID NO: 91 - DNA, 533 bp, Rattus norvegicus
  Genbank Accession No. AA859585
  misc_feature (1)..(533): n = a or c or g or t
tttttttttttttttttggtggtttggaattcttttctcttttgttaaaagaggggtaggaaatggggaccaggtacccctgggctctgggaaacaggcatgcagggaacccttgcaggcaggggctgggtagaagagtcctggagtttcccataatccttcgcaggaaacagcaatgctggcagataaggaggtggagtgaggcagggcccttcaaacaacagggtggcgggccaaggggcttggggctcactctaacatgcaaagtccagctgccccataaactaggttgcttttgaagagcgacatacgtataaatacataagacacagctacacgcacacatgcggagaaggctctgcattcccaagggtanggatctaggcctactggccccaagacaggagtcatcatgtgtctgccaccaagtgattctctgaaacactccaggtggtggggccaggcaggtaagtcttcgttgggatggctgcttggtctccaaggtgctgcccactaggcacccaagccacttt

SEQ ID NO: 92 - DNA, 371 bp, Rattus norvegicus
  Genbank Accession No. AA859663
tttttttttttttttttaagagcttagaaaatttatttttttcttgaaatgacacacatgggcagggaggtaggacttggtgtaggttggtggaaaccgtgtcccccagcatcccagttttcctctcagttctttgatgagaggtctcctaaagactgggaggcggagcggagagctcccagttctaagcttggaatctaacttgaagtgcggagggtatggggatgtggtgggagccatgggactttgttctctggtaaaaccaaaaaatcaaaacaacaaaactccgagtcagctcggggatacttaatttgcatattggatgctgggtttcaggaaggatgttgtgtgttggtccttgcctcgtgccg

SEQ ID NO: 93 - DNA, 455 bp, Rattus norvegicus
  Genbank Accession No. AA859688
  misc_feature (1)..(455): n = a or c or g or t
tttttttttttttttttgggatacagaaatagttttattttcttaatgcagcacagtagacatacaatcgattattccctagagtgtgcaatataaattattcacattaaaaaattaacgacaaagcctgatatgcgggaaatattaaaaacatacacctaatttttatgtgttctgactgcggacatggctagctttataaatctgaataaataggacatggcgcacagtggcttgagtatagacgggcctgctccaggtgtagtgagaacccactctccactttggtcatcgagattccccgtggcagcgtggggcggctctgaaacacttctggcactccagggagggcgtctcgggcgctccccctactctcccttgtancgagggggtcttttctccttgaaagcaagaagaccttccagtctgtccttcgttgagatggtctgagcata

SEQ ID NO: 94 - DNA, 483 bp, Rattus norvegicus
  Genbank Accession No. AA859700
  misc_feature (1)..(483): n = a or c or g or t
tttttttttttttttttcaagctccatcaacttttactttcatgagtaggagagtgggggtcagctgttcgattctgtgcccaggacagcaattgctgcctggcgcccactctctatacagtcattgacagctaccccctcataggaggccccagccaaagtcaggggcaacctctgggccgtcaggaattgcagagctgagtctagtttttgccagtggcctagtgtatactgagggatacagtttttgtgtagatggaccaagcaatggcttggttgctctttcagtcctaactgtgtggcagccgcttcctgtgctgctcgttggaatagctctggagacaattcatggccattggctttcagcttctgtaaccagtaacctcccaacatcacagtcagtctgaggcctgnggggttcccatcctgctcaggaaaagcaaccgagtcatacacgattcccaggacggtcgggtcttctga

SEQ ID NO: 95 - DNA, 504 bp, Rattus norvegicus
  Genbank Accession No. AA859829
tttttttttttttttttgagaaatagaaagctattttattaacacgctttacatttacagttcattagctaatcaacatcaacatgcaaaaataagcgctagatacaaacctctacaatatggttttgtgtgaattacaatggttcatgtctggaaaacccgtcagtacttactttagctgaactatcagtttccgtaatgaaaagcatgtacactctaggactacggaaccacctggcaaggcctctgcagaaactcagtccagtggctttcccgtgaatacattctcaaagcaggagataaggcggtgctggaaggtgagacgctgaacctgtgcacagacacagccccagacaccctggccacaagggcagctcggaagcgtttattcagtgtctcatagggcaccttgagggtcgggtactcctgcaccttcagggtcatggacagctgggccgccgactcctgcaccgccatcttgggccggccctcgtgccgaattct

SEQ ID NO: 96 - DNA, 575 bp, Rattus norvegicus
  Genbank Accession No. AA859832
tttttttttttttttttactggccacttccaagaatgctttacaggttgtgcaaaaacatttacaggctccatgtggtatttgtttgtttgtttttttaaacaagtttttccaactacaactacaacagacatctgataaaacactaaacaactcttctaaggaaaacaaaaccagggattcctcttaataccataatctacaacccatacctgccccaataacatttcttttcataataaaaacacaagacagaaacaaaatgcagacatccactttgatacaggagacctcctgaacaaacccaacaaggatgtggcagtttcattctccattcaactagaaaaacagctttttaaaaagaggactttgacttttctggtgttgtaaaccaacagcgagtatactctctaacccctgttgccccaaacttcagtgttaagtttttgcccttcttatggctccatcacctagaatccaggtcacagacactgtaagtgttacttgttggaggactaacatctgaagggacagcttctgcctcaggaaattaagtttcctattaaaacataattt

SEQ ID NO: 97 - DNA, 435 bp, Rattus norvegicus
  Genbank Accession No. AA859835
tttttttttttttttttctttaaaaaatatcttgtttatttatttttaaactcagggtgaaatacaaaagtcagagtatggtaccgagtttaaatcacagacacaggaagaataaaatccttgctttatctttatgaataccagaaatgtcttttgtttcactatatcacaaatatacagttgtcttcatttactgttgcaggaagatttccttagaatatctgacagcttcatacaacccccacttccaccctgaaacaaacacactgaagatcttgtggcaaaaacaaaacaaaaaatatcccacaaacccccagatacaaagacagaaacactccgagcacagtgattgtctttaccttaagaactagatgcagtaacacaaacaagccctttactgcagggaagagctctccccgccacagcaatgactca

SEQ ID NO: 98 - DNA, 568 bp, Rattus norvegicus
  Genbank Accession No. AA859920
tttttttttttttttttattttataaaattagatccaattttattaaggatttcagattacatatttcagacttctagaggagaatagaaccacttggggactgacagatgtcacaagaaagactgacccctgaagctccacacagcattttcccattagacaagagccagctacctctgcactttggcaacagctacctcctacagaaggaagggaagactgcgctagtctgtaaggttactgaagaggagatctgtaagttataaactttaatgttcaagaaaataggctgtgtttagatgaactatgattacagaaaatagcacaaaccatctaagaaaaagcaaccaaatctttttcaaaatgaagaaaatatagttggttaaggatttccagtagttaaaaatttcaggaagattggctatagaatgtattcacattctaagagcttaatattaaaatctcacaaaaagaactatcacctccaaaaaaagtttcttcaatgtaaattttattaacagcaggaacttcctccaagtccaattcaattaaaccctgtcagagtgc

SEQ ID NO: 99 - DNA, 534 bp, Rattus norvegicus
  Genbank Accession No. AA859933
tttttttttttttttttgcaccaattcaagtttggttttattagaaatcccaccataatcagatttttaaagactggatggttgccttgtaacttttccattcccatttagaaagataactagaagcaatgacaaaaataaccacttaaaataggggattcttcccccgagtttcttgtaagcgtaagtccaggcattccactcttccactcagaaaagaaaaataaaaggctttggagcacaccaacctttactcagatggacaaaacatctgcctccagttctcacgttagaccaggacgcatatccagagtggctggtctccatccagcccatgcttgctaaagcagccgagtaaatcccaaggtcagtcccaaccccaaccttcaacagtatgaactgcttacacctcttatgacacaagccatgcttcggcggaagggtcgggtcagacacccctcatctcccgtgggtgaatcacaacagcagtcatgtttgtgttctcttccctacagttcagtgtgcaaagccatt

SEQ ID NO: 100 - DNA, 536 bp, Rattus norvegicus
  Genbank Accession No. AA859954
tttttttttttttttttggaatgatcaaagatgtctttataaagtttttcacgacttcattctaaatatacagaataaaaaatggcgtactcatttgtgagacaccaaccagattttccttatactgtctcaaaatttaaagatcaatttccccagagggtgtgcaatgcatcataaaatggcctttttgagggtgggaaaggaaggcatattacattgttccatgataggcatgcaagactgctatccaacatatataacttatatacatttggtgacttagaaaaaccaatcatttgtgacaagcctgaaaagcctggcatatttaacatacgtcagaaggttctgtgtggccgaggttctccagttggaccatgtggccctgtgaaagtgtcagaaggccaattttgttaagtttgcagcagaacatcatatccaccctaaagaatacaatgtggattgaatcgaaggtggagaccttaccttaacaaagaaagcaaaagtatgtcagtgtaaaatgtggactaaactgcttt

SEQ ID NO: 101 - DNA, 409 bp, Rattus norvegicus
  Genbank Accession No. AA859966
tttttttttttttttttcaactttattccagtaatttaagagaagattaaaataatagataatatgaaacagatgaagataaccgagctggtacaggtccaggccagcctagtataaagttaaggaggcatggagaatggtgaggcaggggagtggagatctctgttgcaatggcggaaagcagcttggagtatggttgatggtactgtctccttctacacgtgtgttcaatgtgttaacaaatgggaaacggaatcctgcctcattctaaaccagatggtaagagaaatatggcagaacgaggttgtggtatccaggcggctcgggcctgctttgaacactctaattttttcaaagtaaacgcttcgggccccgcgggacactcagctaagagcatcgagggggcgcc

SEQ ID NO: 102 - DNA, 425 bp, Rattus norvegicus
  Genbank Accession No. AA859971
tttttttttttttttttacaaggaagcaactttattactcgttcttattactcattcccagtcagtttctcttcttgctcttgccagtgactttggacggcgtgagggctggagctgtagcctggtacagagtggaggatatcttgttgatgttatacagaccaaccatggagaagatgaatcaagtggtgacacagactctgtggatgaggccatatgcgaagagtgccaattcttatggaaacgccttttacagtcatcgctgatgtgctcagcagatacagtcttgaaggtccggaggcctcttggggtttctacatatcccacaatagccacaaccaccatgggtggggtttccacaatggtcacaggctcgacaacttcggtcttattcaccttagatcctggccggtcaacttcccgga

SEQ ID NO: 103 - DNA, 442 bp, Rattus norvegicus
  Genbank Accession No. AA860030
tttttttttttttttttgacattccacaaagaaatatttattgagcgcctgccacgtgccaggcaccgtttaccccccaatgagaaaacaaaacggaacaaaaacaggacagaggcagcagaaagaaacaaagggcagttggaaaaaagctaagggaactaagcgcttgaagagctcctggatggccgtgctgtttccgatgaaggtgactgccatcttgaggcctcgcggtgggatgtcacagacagccgtcttgacgttgttggggatccattccacgaagtagctgctattcttattctgcacgttgagcatttgctcatctacctccttcatggacatccgtccacggaagacagccgcaaccgtgaggtaccggccgtggcgtgggtcacaggcggccatcatgttcttggcgtcgaagacctgctgggtgagttca

SEQ ID NO: 104 - DNA, 393 bp, Rattus norvegicus
  Genbank Accession No. AA860049
tttttttttttttttttcagtaattcaataatttattcctctaaaaaagtgtgtaaaagtatatagctctcatccacaaggtatatatgaatgacatttaaaatggaggcctttgtcattgtttctttttatcaaagtctttagtgtattgaaccagcactgtgctgtagttcttaaatgaacgtcaaatagttttgtattcttcccaattgtctgctatatataaaagaagctcactgcaaaatgcttgaaggaaaaaggaaacaaaaaagaaaatcagaacttcccagaaatgtacagcttttacatttaaaaaaggctctgagagatacatacaggcatgccggaccagccctcccttctctcgaataccatcaataaagcctcgtgccg

SEQ ID NO: 105 - DNA, 430 bp, Rattus norvegicus
  Genbank Accession No. AA866264
tttttttttttttttttagaggaaaaaatgttatttttatttcaataagtggttcaaaacttaatggcatttctgtaggttagtaaatgtggctctaattgcctgtcatttgttagatgaagtatggatcaaccagaagggccgtgtcgcattagcatcacctccagcagtagcagcaaggtcattgtcctcatttaggagcttcaggtagacgccgcgacaaagactctcatactaatagtcatcagaatatggataattagggtgttcagcagctatgttcacaggaaaatacctgaagtttctgttcaggccatctaggacttccatatcctcggaaggcaactgaaattcaaatacctgaatgttctctttcatctccttctgttcataagtttgggccagggcaacaaccccacgctgtacctgg

SEQ ID NO: 106 - DNA, 505 bp, Rattus norvegicus
  Genbank Accession No. AA866477
tttttttttttttttttgaaggtttcaaaggtactttatttctttattttttttcttcaatatgccatgttttaatgagtacatgattctttgacttggcattcatttatgagttggttttttgaaacaattccttgattattgtatcagctggcatgactactgatctctccattcctttggggtgactctgccaacaggggacaggttccattctattccaatttgtgtggctgtatatgtccatgcagaaatacagaagatgcttccacctgctaatacagcatttccatatttgtcatggaaagtaggtgtcttcttctgatggctctgccttgccaccacttgctgaatgcttcgaacttggagacgacttagtgcgtttttggccaagggcaacatcgcggagacaaggatggaactgcggtgactacagctgctacctgggtgcaaattcaccccagctacccttgcagagtcctgaaaaacaaataaaaaaaacctc

SEQ ID NO: 107 - DNA, 518 bp, Rattus norvegicus
  Genbank Accession No. AA874859
tttttttttttttttttcaagatgtatttatttattatatataagtacactgtaactgtcttcagatacaccagaagagggcatctgatcccattacagatggttgtgagccaccatgtggttgctgggatttgaactcaggacctctggaagaggagtcggtgctctcaaccgctgagccatctctccagcccttagtttaatttttacgttctgtgaatgggtgtcttgcctgcatatatgtgtaccacattcatgcgattctcttagcagccagaagaaggcatcaggtcctttgggactagagttagaaatggttgtgactcccactaccaagtgggaggtgggaattgaacccagatcctcacgagagaggcatctccagtttctgaggtttatgcttaaattggcgtcaagagttccacatagctaagctgtccaggttaaagtatggcccttccagtcactgacccaacattgtcttggcttctaatctctcctgcaggatggacagacgt

SEQ ID NO: 108 - DNA, 585 bp, Rattus norvegicus
  Genbank Accession No. AA874873
tttttttttttttttttcaattttgccaattttattgaaccaataaaattcctactaataacaatgaaataaattctgcaggtataaacgtgatacagtttaacaaaacccattgttctgtacctataaatagattttcaaaatgtcatagaaagtgcagttatgaattgttaacatgttaatacacagctcctttatttcaggtgtgtttgtcttgattcattaacagttccttctttatctgttcaaataatattacccatccctcgaaaaacaaaaggacagccgcagaacgaggaacaacgcttctttctggtttgcaggagctgagccaagcggcaaggccaggtttcccaggtgacctaacagggttctcatctcattcaccttgaccagactgtgcgtgtgcccgttcaattcatagaaagatgccgccaggtggcctgggatttgcttccaatgttcatcttgctttgggtaaaaagagtaaatgtgaagaggaaggaaaaatcctacttcctctctcgcagagacatccaaatgcaaaggaaatgtgtgcactagatgtagatcaccatccttggt

SEQ ID NO: 109 - DNA, 495 bp, Rattus norvegicus
  Genbank Accession No. AA874887
tttttttttaattttttacgttttagaaaaatttattttatatacaacttatttgaaaattttcagtatgaacaatttcaacagagtcctttagatgcaatttcttttgggttcactgcaacactttttgtaatattatatgttttatagatgccaataagtctatctgaaatctcaaacatattatttcgaagagagattattatgaactgtgcattttttgtttgctcgtatatatagaatgcaacaatagacacgtttttaaaatccagagcggcatcaatctcatccatgaagtacaggggagtgggtttgtagtggtgaagggcaaacaccaaggccaatgagctaagggttttctcgcctcctgaaaggttaaagatcttcttccaacttttcttaggtggtcgaacactgaacatgattccttcagaaaaaggatctaaactatccacaagctccagttcagcatcccctcccaaagtgagcatttgc

SEQ ID NO: 110 - DNA, 437 bp, Rattus norvegicus
  Genbank Accession No. AA874897
tttttttttttttttttggagagagcacctttatttgaaataacatcacaggtctctgatcacctcttggagacagagaatagctcagggagagcctacagggcccaggggatcaggttccagccttgcataagcaccaagaactttagggacggtcactcctgccaggcagggagacatacccaagggtggtcctttctatcctctgagtgctggggccaaggccaggttagaggagcaccaggttatgtgggtcataagagaccaagcaccagtcagtgaggtcttcagggctgtggaatagttcttctgtggaacctgctatgaccccagcctcaaggtgtgtggacacggccgctagcaagcctagggtataggctgtttgtaaaagggacacggatttgtgtcatccatcagatagcagggctctagagata

SEQ ID NO: 111 - DNA, 494 bp, Rattus norvegicus
  Genbank Accession No. AA874926
tttttttttttttttttaaattagcttctcaatcatcatctggaaagaaaacattctgagcaacatcattaaaaacagctctgataaagcacggtcactactacgtatcataaagcaggtacaagctattttacatccacagaggtatgatacagtactgtcctacatctataatactagaggatacaatttaaaaggcattatttgagacttgattctacttttccagcagagggcccaaaggatggtgtgtgacacagctttgtaaagaaacatactctagacaggatttcctttcactagtggcacagttctaaggattcattctctccatgaatgtcagctaaaaccgttattaaaaaaatgaaatatccctaaaacaaaaccgtataaccaccggattcacatgaagatgacctagtggagacaagctggacctcaccttaccaacaagctatcaaatctgttacgtttaaacagtgagacctccaagg

SEQ ID NO: 112 - DNA, 580 bp, Rattus norvegicus
  Genbank Accession No. AA875032
tttttttttttttttttctgatcttaattcattttattctacaaaatgctactcagtggaaagtaggaaagccaacaagacaacaagaacataaaacgagaacaaaccccgagggaaaataagttttaatatgttcttccctccatagcagcaagctctaaacagctttccttagtgcaaatactgtaggcttgtgtcacacacagtacacagaacaacgcaacacacaccaccacagatgcttctgagcagagatactcctcaaaaatttaaaactatacaaagattttttgagcacgtggtcctgcctggagaattcgactagagagaccctcctaggaccatttcaccattactgtaaaaacgggacaaaaggtccccagaaaggaaattagaattccccatggagccataaaaccttgtacaactcgtttgcctccagggtctaatagcaaatttcactgcacgtcattgacatatcccaaatacggatgcataaagcttgagtttctacgatataccaaaatacgatatatatacaactcccactgcaaaagaaaccctgatacctagtctttat

SEQ ID NO: 113 - DNA, 475 bp, Rattus norvegicus
  Genbank Accession No. AA875171
tttttttttttttttttatgagtatggaattaattaaaacttcgaatctttattttgtctggatctttgggcacaacaaaggctggccagcaggtccctcttgtcagtgatattgtctggcctagaagatgccaaaagaagccatgtccacaccacaccagtttggtgcactctgctgagaccacacttggcctctctctgaaaagacactcaaggctcagaacatttctgttcttcatggccgcctggctcacaggatgttccctcgtagtcctgggtcgccccgcaactgctctgagatttcacctaccgggagctgctgacccaggagctgagagtgggtggtttctgtgggctgagtgtgtgggattccatgctgttcgagcagacttgtcagtctttgtacctcccgtgacagctctgcgtgtgcctttctgcaaatgtccagagtctcaagccagcatcctcaaaaagt

SEQ ID NO: 114 - DNA, 514 bp, Rattus norvegicus
  Genbank Accession No. AA875286
tttttttttttttttttgtgggttaaaaggctttattagggaaacatacaggggcaaggaccatccttgggagacctcaggacgctgtcctccaggttgctgggcaggtacagtccccaggagcccctgctcagaagcatctgacctgggaggcagtaggaggggtggcttctactagtgaaactgccccctgcccccccagtacttaagctgtggccctggcacccattccttgccagggatattggtaacaggaggcagtgactcatgcagcaggtctaaggccagggtcaccctgctgcttcccacaaacacaagtgccgctcaccagtctccactggggcctcgtctgggactgtgacctgcccagcctaggagtccactagccacccatccctcgctgctgctgctcctgctccaggcttcgctgcaggacctgctgctggttggcaatgacacgacggataccattgacaaagttgctctggtcatgcgggatgaggccaatgaagat

SEQ ID NO: 115 - DNA, 394 bp, Rattus norvegicus
  Genbank Accession No. AA875327
tttttttttttttttttgttatgtaaggttctcttttatttaaaagatcattcacaaaataccatatccatagactcactttctgtcatagaactgaatgtgttaagtgtttggaattccattcttacagagtcagctgggcgcccagcagtgtggatggacgtgcctgttctgtcttttccgcattggagatggattagatcatctgaaagcatcagctttgattacaaccacgcaatgcatgtctccaattctgtgtgctcatcccagctggatacctaccaacaggccaccacagccgcctagctagtggccccagctctttcccagaagccaaggggtggctggcaggaagctgctggctaacgagcaagctgcgcacctcagcccttct

SEQ ID NO: 116 - DNA, 512 bp, Rattus norvegicus
  Genbank Accession No. AA875495
tttttttttttttttttgtataaaaaagatttattgaaatttatcaatgacaaacagacataaaactcaaagtttggctcttctcaggggcgggagaaaaatgagttacagctgatctgtacaaatgagacacagggtaggaaacagcacgtcacttctaaagcaatctggaaggggggcgctgaaggcacacgcactctctaggagaaatctgcggccacttcagagtcccaccaggtaagaaaatacgagcttgcattccttttccgtgctcctatgtatttgagaaggaaaacaaacagaacaaaaacccagaggacacacagggcgcttccagagcttagatttgttaaaaggttctaagctggagcgcccgaggagtcctcctgccatttctgtaaaacaaattgctctaatattttacagaacaagatagaacaggttggcttttctgaagaagctgaaacacgaaggttcacttctttcccattttacgtgtctcctaaacctgc

SEQ ID NO: 117 - DNA, 403 bp, Rattus norvegicus
  Genbank Accession No. AA875523
ttttcttttttttttttcaaagagcaagttttatttggtgaaggcaaacatcatccaaaagaaaccagacaggcaaggtgctgtgattagggagcctctggggccacacaggaatctcacactgggcaaggagcaggctcgagacacgtaaatgtcctcagccattcagcaccatccggacaagctccgccccatgggcccgtcaccccgacaggatatgcctcacaaatgcttcatagttaatgcaaccgttgctgtcctcatgccccgccactagcatctcgacttcttcctctgtcatcttctcccccagtgtgactaggacatgacggatttcagcacccatgacagtgccattcccttctttgtcaaacacacgaaggccttcaacataatcctcgta

SEQ ID NO: 118 - DNA, 519 bp, Rattus norvegicus
  Genbank Accession No. AA875552
tttttttttttttttttaacgtgtgccaggtgccactttaattgagtcctcaccacagtgaggaagggtggaagacagtgattgcttccaggctaagccccatcggccctgaggtaaccaacctcgctccccacagtagaaacatgccttccttcccctgagaatcccatgcctgagccaacacagggaaggatgtgcacagaaaaataagagaagctcatcaagggagccaggggcatttctgaaatttttccagtgcaaagactagttgacctggaggtgtccctcctaatggcaatgataaaccccaatcattcccagctgaggccaagcccttccccagggagcctgagaccagggttcatgccccagggctcctccctgcagtgctcccaggaaagatcagcagcctgcccagccatggagagagcccgctgagcagatgcgtcttcctctttgctggcccctactacggcaggtgtacagccataaaggaccaggcagtacaggtgtggctgt

SEQ ID NO: 119 - DNA, 404 bp, Rattus norvegicus
  Genbank Accession No. AA875620
tttttttttttttttttgcttttaaaagattttattacaagcaggaaaccatgcacttccattgcaagccattgtaagcagaaagacagatacacttcaggcaaggtaggcttttattacattggctaatgctcatgttcaagtgaggctctggttcagtctgggctgccacctgccatgcctgtgatgtgggacagccagcacccacggctttgcggcctttcacgctcggatagctggcaacaaggcagtagtaaaaaggagtccaacttgtcagttttgagtagcagctaaggccttcccagcacagaggacaaagggcttgttatacaatgagatgatcatgacattctagtcacttgtaggaactccaccttagtctgggtcctaagttagcccacatc

SEQ ID NO: 120 - DNA, 446 bp, Rattus norvegicus
  Genbank Accession No. AA891041
aaatagattcaataaaaagtcaaacacacacacaaacacatcttaaaatagactttagacacgaagtgcgtgtttcttctccacagtactgtgcagagggggagggcagggggcggaggttcctccctagtatccccacaggctgagtaccaggcggcggggccagctccgccgcgacaacccccttctcccctccctgttaaatacacaaatatattatattcaatatgaattcagtctctttccagaaaaaaaaaacatacaaaatacgctggaagggggccatgtaaacctcgaggtggaaggactgggcgcaggcgggcaggccagagtccagtgtgtgagctgcgccccagacctctgggcgagtgcccatcgcctgcccccctcaccccagtggggggcgggcgcccagccttcaaggctgggggtgtccgtatggagca

SEQ ID NO: 121 - DNA, 412 bp, Rattus norvegicus
  Genbank Accession No. AA891068
gctctgaaaacactttattacacaaattacattcagattctgaaaaatagtgttctaacagtgtaaccatctaaaaataagacatcccggaaacacaccaactgaggagaaatttaaaaatgaatttaaatagagactttttaaaatttctctcattgcaatataatgttagtgattttaaaaaaatagaaggagatttagcagcttttcgtcgtgtggcaggttggttctcttcactgccacaggctgagaatgctgaacaggaaaggcaccaaagaaagacactggcgatgggtgtggactgggagaatactgtgttcaagcagagaatagggctatttacatccaccaactaaaacgtctccaaatgtgaatgagctaaacttccctcgggggttggagcgctaccttg

SEQ ID NO: 122 - DNA, 592 bp, Rattus norvegicus
  Genbank Accession No. AA891171
acaggtgttaacatattaacctaaacttcactgtcacagaaagacatcccataaaattcagaaaatattcaggttgtggtgaggaagatcaagccttttgaagacttcaacgcactggatggaatggctcaagaatttcagcataagttttcttctctttctcaggaaaatcttctggatgtaattttatatacccgaacatgtcatggtccctcacagcatacagatagttttgacgttttaaataaaaatatccagcaaagaaaaaggaagtaacatacagaagctggcgatgcaaaccttagtagacaaccctgtagctcctcctccgggtaggacggcctcgcagccctcacctgctttcatcacaggtctcattcgcatcatgttgtccatcaggcccgtgcagtagcccaggaagccgatgtagacaagccgcgggtcgttcagcttgggcgggggcagtctccgggcctcatccggcaagaatcttaagggctcatggcccggccggccgttcatcatattgatgcggggttcacgtgaggtctgacctcgactccaactataagaaaaaccacgactacaaacc

SEQ ID NO: 123 - DNA, 484 bp, Rattus norvegicus
  Genbank Accession No. AA891423
  misc_feature (1)..(484): n = a or c or g or t
actgtggctaaacagccacaattagcaactttaatataaagtttttaatacaaagttcaccacaaagaaagcagatgccatgcgtggaggcacgtggactgcagctgcctcatcctcaagtcccgggcttctggtgttttgtcctcggatccagcagttcccatgtggaggctgcatggcctctgtccttaacattgatgccgtgggtcatgaggtcctggcggagtgcgtcacatgcctccagcaagggctgcctctcctggagctgctgtttccgggcctccccggtggccccaggcgtggccagtgcatactggcggaccttaagcctgaagcgcactagttcatctaccacacagtgcanggctactgtgctgctgtctcctgaaacacactgtcgcttggccagagaaatccaacagtctcgaaaaactgctcaacgtaggcaacgatggccccaaacacagtgggacttctcgggcca

SEQ ID NO: 124 - DNA, 388 bp, Rattus norvegicus
  Genbank Accession No. AA891670
gagtggttccagcaagagaaggggaggcctgcccctcctcctggcaggcctagatgagtctctgccattgaaccgaggccaggaaggtacggatttgcataggctgcagtgtgattgaggtagggtccaaccgggaaggagcagggtaggagatgggaccagtatctgtcatccacttgagcctggaaaccctggataggggtgttaaagcggctgatgacttcctttccccagtcatctttcactgggattggtcccaccgtccactccagctccaaatgacgctgtccttcatacaggcgaatcacttgggaacaccaggctgaaaaattctggtgtacctcctgcaccaagtttgtcttcaccaaagtgacctgagcccagtggc

SEQ ID NO: 125 - DNA, 582 bp, Rattus norvegicus
  Genbank Accession No. AA891693
  misc_feature (1)..(582): n = a or c or g or t
cgccttgcggccgcaaaactttttttttttttttttttttttttgagcacgaggcctgtggctggctttattttattcacactggaacattaaaataaacttacaacatttactattgtgcgttctatgggtgaaactgtcattcgagaaaatgtacaagaattatcatttccatagcatagattaagtaaatgggttttaattttgccacatatactaatgattaaaaagtttctgaattcttagcactctgtttgccccatcagtgacatttatgctcaaaaagttggcaaataggaagtaggataccttatatttaaaacagtgtgctgttttagaaagtacaaaatttagcctataggtgtaactggatactggtttgcacataacagagagggcatcagctaaaggttattactttctaagggaaacctttaaaacttatgaaaaaaaaatcacttgagaagaaaccatcccttagtgggtcatcgtcttctactgtcaggtttgctgtncccgtgtaatgggcttgtcctgcaacttccactatgacggctttgaaatctcacacttttgcttcct

SEQ ID NO: 126 - DNA, 516 bp, Rattus norvegicus
  Genbank Accession No. AA891735
aatacaagtaaaagggggcagggcaactccttccccctccaggtcaggaccaggagaatctgctgggctgtccccgggaccaaagaggaaaagagtgacatagaaactgaagcaaaggaagcttagtcacactcaggtgagggtgacagctcctcctggattttgtttccatttattaaaaaaaaaaagaaaagaaagaaagaaaaagccaccccctcactcccagcccattcctcacagccagggtcagaaagcagcatcagtgaggcgggttcctcacctctggttatctctggcccaggtcagcttgagccacctgccctcaccaggagagggtttcagttggcagttaggcttggggaagtctctacctggaccccccagaggcctgggagcacccccctcctcccaggaaagggaatgcagtgtctactgggctcagaggggtggcctcacccacctgacatgagtcctgattctcccatctcgaggacggcaggaagtttattgcaccag

SEQ ID NO: 127 - DNA, 558 bp, Rattus norvegicus
  Genbank Accession No. AA891737
aaatggttcagaatcactgtgaggcttttagatgttcccattattcaaacaacccaaattaaaaacatacaactcacattttaagtaatataagcaaaataaaaattatctttaacaatgccttatattttgttttagtattctactatagacacataagaataattatttccattttctgcttccctcaaaactataaaatgctgttacatatttttgaaaaatcaaactccttcatatcctttcatcaattttatgttgaaaagagagttattttgaagcactggaattagtgttggaaaaataggtttagagtccaaagctggtgtgtttgcgaataagaacacaagctgacaagtgatttaaattccttagaaaccttcacagttctccatatgtacatgtggcagaaggatgaattgccagccaatatacatcagtgatcagttgcttacatttcaaagatcaaaacacttggtgggaagcctagaaggaaacacttaaagacatataattaagaactcttatctctgaaaagcaaagtccacattttagtta

SEQ ID NO: 128 - DNA, 599 bp, Rattus norvegicus
  Genbank Accession No. AA891739
gagcgtcccggaagttttattgggttctggttgggtcagggtccccccttcatcatctagcgagccgcgctcagcgcccgttactgggcgcgctcagctgccccatcatgtcggccagcatgcgattgcacagcgcggcgtacggattgagcagcaccaactggcgccgtgcgaacgagctgcccagtctcgccgcctgctcgaagtctctgcgggcatcgtcgtcccgaccctgaaatcgtgccagcagcccgcgctgcacgaagctctggcgggcggcgcgaccccggccgccgctcaacgtcaccgcgcgctccaagtcctctagggcgcctgctacatccccctggagccgcctcgcttgggcacggttgttgtacgcagaggctctctcaggtagcaggctaatggctttgccaaacctctccagggctgtgtggaggtccccagcttctgctgccctcactccctgcaactccagggccttggattgctccaactgtgcttgagggaaaactccatcttcatctccctcctctgtttcttccaggtccaatccaacaacatctccaaagggggtattagggttgaggatggcc

SEQ ID NO: 129 - DNA, 423 bp, Rattus norvegicus
  Genbank Accession No. AA891769
ctgtctctctgaacacgggggagacacatgggaccagaggggagacaagtgtgaccatggggagggctggactggacaacgggatggcacatgtgaggggaaagacaggcgtgatgacgtgtaaccatgaagacgagtgtgaatacagagaaggcaggtggaaaggggagtggatgggtgtgactgcggggaaggcaggtttgaccttggtcgggagagacggtggcttcccccttactttaagaagggaaagctgtgaggtatcaacaacccaggcacttgaagaaggaggaactcggaagagaagtcccttagctgctgtggactaagcagactcttccatctccaacaggtcatccacatactccacaacctctccctcatcgtcgtccatgaggtgttcctgagcgaagtcatacagtt

SEQ ID NO: 130 - DNA, 555 bp, Rattus norvegicus
  Genbank Accession No. AA891774
ccagggacctccgtagtcggtctccctatcccactcccaaacctcagagcaggaaatgggcttggctgagaagattcatgcttgatgaccaggggaggcgtgcagccccccaagaagaaggggaaaagaaaaacggggaggttgaaaagcagagaggtgcaccttcccttctgaggaagcaattctggtctgggaccagttgcaaggggttagtaagagaaacctaaggggtgcttacatttttattctggcaaatgaatctcttaaaaggctccctcctaggggtgcttacatttttattctggcaaatgaatctcttaaaaggctccctccttcgttcgggggaacagcacatgtacctgtgtcagcgtgagatgcaatgctacacaagaacgtggcattgggccaatcatgtggacccctgtgctgctcccaagggagaggttctgtttgggtgtgggataaatctaaacaagcatacactcgtgttatatgtggccttaagggtaggggagcaaaaggaatggacttctctgtagagcagctcaagaggga

SEQ ID NO: 131 - DNA, 518 bp, Rattus norvegicus
  Genbank Accession No. AA891785
gaagagctttttagtagctaaatatggcaccacgtgactcagggcaatataaattacagtatgcaaaacacactgactggctgaggtaaagcgcaccgttcctgcctcgtgtccactgtgagggaaattgctcacatgctttaaaaaacatctccatcatatatatatatatgtaaaaaaataatcccctagaaaggccaccagagaggggggctacaacgcccaccctctaccatgtacggagcacccactggagctgggtagtgtagtgtccacccctactgcttgcccagagctctgtgtccaggcaaagatgctggcaatagggttggtactggtgggccggcccttctggtgttctcggtagtggcgggtgactgtcccgtgagcagcctcagcttcaatggtcttcccgtcagggcagaccagcacagatgtcatcaggccaagggagccaaatccttgagccaggatgtcagactgtacatctccgtcatagttcttgcaggcccacacaa

SEQ ID NO: 132 - DNA, 636 bp, Rattus norvegicus
  Genbank Accession No. AA891789
gaaatttagaaacaagttttatttaagatctgaaatacaattcctaaaatatcaacttttcagaaaactgtggctacacaataatgcattgcctctatcatgttagaacgtgcattagactcaaatacaaaaaccaggaaacaaatcaccatccttcaacaatttgagcaaagatagaatgaatgcctaaggaacaacaaagatggacttgcagaggatgggctgtttacagacgtcaagcaccataaaaaaaaaaaaagaagcacaaatgcgtgggtttccaggtatatacagtaagttgaacctttggcactaggaaccagggcatctcatcacgtagcattaacacatattagaaaactgtgtagtgtcaaagggatagaaccaccagcattcaagcaatgttgtcaactaggcaataaaatggtctactgaacttcttctttgtctaattactgcatacactggtagcaactttgaaatgaggaaaggagctgggcactccttttattttctgtctacaacagaacaggaaacaaactgaaacataagccctgttttacatcgacagttttaaagaacatcaattatacaatgagagggactaaacagaagtgtttacagataccagacaat

SEQ ID NO: 133 - DNA, 609 bp, Rattus norvegicus
  Genbank Accession No. AA891790
ggagctcttgcaaggatttatttgctacagaattgctttcataccccagcgagctggactaaggacttctgggtctaaaaggatttaggtcacttcatgttttcaagtgctgtgacattcaaaaagcaattttggtagggcagagatggggtagagtagcaccatttgccatgtggtaagaggcgagaaaaataatcagtaatattaaacgtctaagaatagagaaggaaagaatactttaaagttcccatctggacagtccctgagctgaaatcacatttatgtgtgaagagaaatgtttgggctgtgaccgtgaagtgacagatgctgaccttgggcttggctggtgaaagcttccagacactctgaatgacaggatatacgccactcatctggctgattctggcacgtgtcctaaatgtctcctaaatcccaactctcctggttctctgaaaggcctgtggtcatctgatccccaatacttctttttatttttgagacagggtctctctacatagccctggctgtcctggagctccatgtagatcaggctagcctcgaactcacagagatcctcctgctcctgcttcccaagtgctgcccaatact

SEQ ID NO: 134 - DNA, 620 bp, Rattus norvegicus
  Genbank Accession No. AA891800
aaaaagttttaacaatgatgtcggacaggaagttatcagacggtcatccacttgcttcacaagagcactaaaggaaaaggagtccccggggtcctcggaggtttaaagtctcagtgcagaagccccagagtccccatcagttgcggaggaagtgccacacttcttcttctacactgctttctttactcattgaaggtgttgggatcgattcaactagtgaccttgcttcctctgtagtgcagtggaaagggctatcacagatgtgcacgttcacacaactgatagctcccttgtcacacttcttcatcaccatctctttccaatgttcatgtgcagagttaataacttcgagggcaaaagccttgtttttgaattctccattaaaagcaaacttgttttctggttttccatctggtaccttatagagtctaaaccaattgacagtggcttctaggtaacctggtttgaacttcttaacatcatcaatatcatgaaatttttcagcctcaggatcattcacattgatagcaattattttccaatctgtttcactctgatcgataagtgccaaagtccccaggatcttcacatggaccacgtctccacgggaaagaaccttg

SEQ ID NO: 135 - DNA, 475 bp, Rattus norvegicus
  Genbank Accession No. AA891831
agaggaaaaaatgttatttttatttcaataagtggttcaaaacttaatggcatttctgtaggttagtaaatgtggctctaattgcctgtcatttgctagatgaagtatggatcaaccagaagggccgtgtcgctttagcatcacctccagcagtagcagcaaggtcattgtcctcatttaggagcttcaggtagacgccgcgacaaagactctcatactaatagtcatcagaatatggataattagggtgttcagcaactatgttcacaggaaaatacctgaagtttctgttcaggccatctaggacttccatatcctcggtaggcaactgaaattcaaatacctgaatgttctctttcaactccttctgttcataaggttgggtcagggcaacaatcccacgctgtacctggtagcgaagggcaaactgagctggacttcgattgcgttttttgggcatgccaccatgaactgg

SEQ ID NO: 136 - DNA, 591 bp, Rattus norvegicus
  Genbank Accession No. AA891842
aacaaacacctaatatttattaataaattagtatacttgaaggcatttttctgatatcagttcctcaccactaagcccacccacacaaaggcagtgggcgtctagctctgcattagagtctgacaactgagcatcagaggacaggttgataaatgagagagcgtagttgcaaatttatcggacaggagttcttacagctgcagccatttttaacgaaagtggttggatgacaaaggaaacccagcaaggccttgagggcagactggacctatagactatgtgtattgagagagagagagagagagagagagagagagagagagagagagagagaggaataaaaaaaataagagaaatatcttttaaagcaaagctgggcataaagtggctttccaaggtgcagcaaaggtgttcctaaaagatgaagatcgagttctttggcggcccaggtgtcaagccactgaaacagcaagtcctggggacttaaggatttcattctccagcccagagcttagcagcattaacgggagcacaagttacaagcagtgtacggtgtccagacgagaaccatacagcgagcgatagagagtg

SEQ ID NO: 137 - DNA, 583 bp, Rattus norvegicus
  Genbank Accession No. AA891858
  misc_feature (1)..(583): n = a or c or g or t
acagggtccagtctagctctctgagcctttattactggacaaagagctgccatttggagtattaccatggtcgtcctgtaaagtaagtgctcaggctttggggacatgcctggtgacagtgtctccactccaacaaggtgaaggactcttggtccccagtgcatcttgggttctgggtcctttctccgtgagatcagatggagctggggtagacctcccagctggggctgcttagatcactcacatggctgtcttcaggggcacactgtctgccggctgatccaggtccttcctcgccagggccaggtgtgtgaagacaagaatgaggatgaaacctatcgctgccagggtgcccaagaggacacccaccgctgacagcttcgtgggcattcccttcatgcgacccaccttgcgcatgcattgaccctccacattgcagcgacacacgatcacttggacttggagttgccacatttgggcatcatggtggacaaccacaggtactgtgtattcaccaggctctacccagtgcaatgccaaggtgaggtangcggggtgtacagaggtgtcggctgggcccgga

SEQ ID NO: 138 - DNA, 480 bp, Rattus norvegicus
  Genbank Accession No. AA891884
ggtacaagaagcattttccccccagttcccatccaggaagactgaggtctgaaggtggatcctctttctatcccatctcattactggttgagaacagctcctaaaatacaagtcttggaacctttgcgaattggcttgtaaggagtatgtatctgcaacatgtatggcctgcggcttactcaaacatgtctggttacttgtccttctatctagtctccactccttcctgagatgagaggcctgtgttgctggaggaaaagtggctggtagcatttgcctgattcagtgcataaagaaatgtgactgggagccacagccttcaaaaggtgaagctagggttgctgtgtgtggagtcctaggccatcctgggctacatggtttcaggccagttgacacagtgagacccagctttacacaacactttattctgcaagcacaggtatgataaatgggaagattttgaatcctggaactgttgct

SEQ ID NO: 139 - DNA, 550 bp, Rattus norvegicus
  Genbank Accession No. AA891943
gaaagaatgcactttttagtagatatgagtgtgagactcttgtctcgttattgctggtgtgcttctcggtctctggcagcagtgtaattatctgcgcatgcctgacctgcagtcaggcggtagaggggccaagcatctccgctccgggcagcagtactggttgtgcgtctttgactccacattagcgtgctccttcagtgttgccttcctcctgccttctgtttattccacgcatctcagcagaggaaacagcagcgctgctcctaaattcactctaagccactgacaggaagaatttgggctgtgctataaagtttccaatatgtctcgacattgttctccagctggtggtgatacttggggatacgatggcatctttactaatggggacaatgtatgcatgaattataaaccagagacgggagagatggccaagtggttaagagtgcttcttgcagcagatccaagttcaggtcccagggcccacatcaaaatcacctgtaattctagttgcaggggatcagataccctcttctggttccgtgtgtgc

SEQ ID NO: 140 - DNA, 569 bp, Rattus norvegicus
  Genbank Accession No. AA891949
aagcagaaaaacgtttatttctatcaaattccatacaaatcaatcttcaagcaagataacaaaacaatcaattaatacaatgaatagttaggacagcacatacagaacagactctggattaagcacatacgccaaaatcatcttgaacaccaactgtcactgaaggaaagctgatgtgtcagctcccgggggacttaagccaacattgcattaaagactgccttgaacttggggggatcacagtgaaacgccatcacagctcaacatagtcccccagacatccgttcagctcagaaaacaaaattggcaaattcagtagtacaagttctcataaaactagagaagccttgagccccaccatttcttgcagttcacacaaagcccgggtttcccatttttcttcccttttcccgaatcccagagagaaggtgcagtactcttttcaaaggttttaaacaagagtcttttattgaaagatgttgtgcttcctacaattgtctgtcactagagggagtccatgtggagccgtgggcaatggcttactcacttaacctgtctctcacacccaa

SEQ ID NO: 141 - DNA, 216 bp, Rattus norvegicus
  Genbank Accession No. AA891965
agagatccagtttgacgttttattaggtccagccctctgctacctgagcagtttcctcatcatccccagggatgggcttctatactcccgcccaaagtggttccaatggtttaggtagttaaagagctggtagagcagcaggcgtttgtcgaaccctggagcctttgggatcttctgatggtaggcagtgaagaatgatctggggaaccccccaag

SEQ ID NO: 142 - DNA, 102 bp, Rattus norvegicus
  Genbank Accession No. AA891998
agcacaacaaaggagcccttatttattatgtgcaaggccctaggttcaacctccatacccccaaagaccaaaaaaattaaacggatgtgtaatgtacaactg

SEQ ID NO: 143 - DNA, 443 bp, Rattus norvegicus
  Genbank Accession No. AA892006
caccagttaaatttaagaacctctctcgtctctattaacagataggaagcttcagggaccaggtactttgaggagctttctgagccagtgaaagaaaacaaaatatttcctggaactggtaagcttgctgttttcagagtgtcaacaagcaaacacacacgccacacacgtacctcgtgaaaacaatgccgctctggcccccggccacactgcctgcaggcactgctgcgtgtccttgtcagtgaatgttaatgcagaccactgggagctgaaggcgagggagctccctgagggagtgtaggcagcagccctgccaccagcttctagagatctagatgtgagctgcaatctgcgactccatcttggcctgagcagggctggaaggagcacaacagcacgtaccagtgtatggggaaaagaactgacatggctggctccggctg

SEQ ID NO: 144 - DNA, 421 bp, Rattus norvegicus
  Genbank Accession No. AA892014
  misc_feature (1)..(421): n = a or c or g or t
ctctgataaatcaggactaagtttacgagtggtggtgacgcagagaggcatggagagggtgggctgaagtgtcaggggtggggcagtagtgtttcctccctgaccccttcgtcctcttctacaacagactgccacagtccagaataggtgattcctctaccgtgtctgttcaactgaagaaagaaacagtcagttacaacaagacacacaatgggaacacacacacacacacacacacacacacacacacacacacaccaagccggcactcactgtangaggaaatgtcgatctcatcgggcagctcactgatgttgacctcgaaacggtcctgcacgtcattcaagatcttggcatcgttctcgtctgacacaaatgtgatggccaagcccttggtgccaaaccggcccgctctggccac

SEQ ID NO: 145 - DNA, 487 bp, Rattus norvegicus
  Genbank Accession No. AA892027
  misc_feature (1)..(487): n = a or c or g or t
ggaaatccaaactattttttaaaacaaaatattatttaaatattatgaatctctgaagtcatgagacttatctctccaaaagggaaggacccatggtttctattttttatgcagcattttcaaatacacatgtcaatatatatttcataaactactaaaaaataaaaccctttatcctctgaggttattgatgtgtcctaggtctccaacacatctcattaaacagtaagttctattcatcttcatgaatgaggtgggaactagactaaaaaataggattttaatccctgaggtgtcagttaaaatgcagaggttgccaagattttttttttcatttaaaaattagctttaaataattagcatggatcatgctatctcaatcaaaaccacttcctctacacggagtcctttagaaaattacattttctgggttatggtcaacctgatgtcncagctctccagctatgagactttttttttccttttg

SEQ ID NO: 146 - DNA, 433 bp, Rattus norvegicus
  Genbank Accession No. AA892112
cagggctaaggacctttattgagcacacggcccctgatggtgctgacggagaaaccttaggctttccttcccagcagcctccgccacagttcttggctgagtagtgcctgctccctccgggcgccctgcagcacactcctgttctcctgggctcttcggatcaggtaggatatcacctcttccaggcagccataggggatagacttatataccatgtatccagcttgccctaatgccagggagacgtggtcacacatgcccagaagttgtccgaagcagacaggcccatccagaggaatgcccagctcccacatgctgcagaaagggtcacattgtcaatccagagagtggctacagcgcctcgttgcctggcgaatggattcttcattgtgggaagccacatgaggtggcaccggggaccgtggttggacac

SEQ ID NO: 147 - DNA, 443 bp, Rattus norvegicus
  Genbank Accession No. AA892128
  misc_feature (1)..(443): n = a or c or g or t
agacataattaatgttacagtaaaaataggcatttactcatatttgtcttgttttagccactttaatttctttcatctcccctccccctaaggttttctcaaagcacattatcattttacaaatacagtgccaaggtcctgagtccactttgcaagaatcttcttcacattcacggaaagcagttacttagtgcagagttctcatttccacttaactgtacacggctttatcggtgctgagacactggcccacctgctggccagtgtctcccacttcacacacctaaaccaagctcaagacaggaaggctgagccgtgaagagcatcnccacancctctccactggcccgatagctctttcccgcccctcccagttgtcctgagaaaaatcagatttgtcacagaaaactgacattcctacattcataggcagaagaatttta

SEQ ID NO: 148 - DNA, 490 bp, Rattus norvegicus
  Genbank Accession No. AA892132
ggcgggcgggtgttgttttatttcagtctgggcatgatgcgtatgaacaggatcatgctgatgaacacgaagcacacgacgatgagcatggcccacagcagccagttcaccgacttctgtgcgtgctgctccagccgctctgactccagcttcagcttctccaggttctggtctgccatcttgagcgaatgtgacagggtctggttgtccttcttgatgacactctgggcagccagtgtgttggtcttcaggctgcgggccaagcctagcatctcctcagccagcttttcctggagaccctggtgcctctggaggacgaggtctagctcggacgctgactgcttctcatctgcaggtctaggccccttcacaactcgcttcctcatgtctgcctccagctctccagaggactccgtgcccaacagctcactccgcatctcactggtgtaacgtgctctagactgcagatgtacagtcttggtggcaggca

SEQ ID NO: 149 - DNA, 632 bp, Rattus norvegicus
  Genbank Accession No. AA892234
cggccgccaaaatttttttttttttttttttttttttttttaggtacgaggctgacgccagataagtttttattatatttaaaaaacagtggagctggaagtaagggcgggtcgttgaaggcgactgagaggtgaaaggcctcccgttcctcagtggcaggatctggacccactgcctaggccgggtttaatccagccgagatgctggaaagcagagcacacagttgtgcccatcagggcaaagagggcaagagagctcacagctcctcgataccgcttgctagggtctcccgtgtagtagccatatgcgtaaagaactcgcccaataatccacgccacgcccaggccagaagctatgcgcgggtggtaaacacctcccacggttaggaagaataggaagggagggtacacctccaacgtgttctggtgggcgcgctgaatgcagttgaacatatgcccattctcaggatctgtgctgtacatgacagggtactctaccttgtacttcttgcgggctttgcccacgttgatggctaagtggagcaccatcacaaagctggcggcaccagtgagaagcacgaatccatattccttagagaggacagccatcttggctctggctcaccttgacg

SEQ ID NO: 150 - DNA, 587 bp, Rattus norvegicus
  Genbank Accession No. AA892248
agggtttgctgaaaatggcggtatataggctgaattatcgagaaggggtaaggtagaacggggtttatcgattatagaacaggctcctctaaatggatataaagtaccgccaagtcctttgagttttaagctgtagctagtagttctctggcaaataattttgtaggtttaattattaaggtttagggctaagcatagtggggtatctaatcccagtttgggtcttagctatcgtgcattatataaatgattagaattactttcgttattgggcttaagtcctaacaatgaattttcacatataacttggattttaattctattatgacatttatagttggcacgttttacgccgaaaataattagtttgggttaatcgtatgaccgcggtggctggcacgaaatttaccaaccctgacaggtatagcttagtcaaactttcgttcagtgcctaatatttatcactgctgagtcccgtgggggtgtggctaagcaaggcgtcttgagctatattatgtgcttgatgccctctccttaagttttacgcaaatgtttaagggattttacaccggtttatggatgtttgc

SEQ ID NO: 151 - DNA, 529 bp, Rattus norvegicus
  Genbank Accession No. AA892273
  misc_feature (1)..(529): n = a or c or g or t
caaacattcaagaacagttcatttctatgtgatgtaaactcttccataaagtaagacaagaggcaacagtcccccgctcagaggtacgcagaccaaaaggaccattcaggaccatcttagaaacctctttagaaatcttactaaaaacaaaggcactcatatacaagaatgttcatagcagcattgtgtataagaacagaaacctgcaaacagcccaaatgttattcagcaggtgagtggctacctaagttgttttgtctgcttggtggagtattatacagatggaaatgaacaagttatagcaatcacaacgtacaggagtcttacaaacaatggttaagtgcaaaaaagcaaacctcaaggaacagagtacaacatttttgtaaagctaaaagtacaagcaatacannataatacattcctaaaggatatatacacacatgggcaatattattataacaagtgattaatgagcataaaattaaagacagtggctacctctaggaagaggctgggcaaggggacaaaa

SEQ ID NO: 152 - DNA, 605 bp, Rattus norvegicus
  Genbank Accession No. AA892280
acacttacgctttattggagtgtaaaatctataccatgtgctccttcacaacgaaggccccttgaagaaccacaccagacacatgtaaagacatgaaacaacgcttagtaggctccggtcccacatgagatgtcatcatgatgtcgggactaagagtataatggggcctggtcagtggctcagtttctgattttgttgagaaatgtaggtttggaggttgtgaaagatgaggatgaactcatgtgcctgagccctggggaggtctgactcacctttgggctctactggcaaatatggcgtccttccccacaaagagggcagagagtttgactaggtgtaggactaagcagacaggaagtttgtgtaagaaatatcagggtgaatgggggcgagggactgtgggatgtgatggctggagggatcttgtgggagatctcttcaaatagtaaatgtatgactattaggaaaaaaagtattgcaaagatataactgttttgctggtggtaatgagtacataccccagtgtttcaacccaacactctgtgtgtggctctatccttctgtccttccttaattagcccaggtcatggtgaaacttttttttt

SEQ ID NO: 153 - DNA, 454 bp, Rattus norvegicus
  Genbank Accession No. AA892310
gaaaggacagcctggctttaatcaagtctcagaaagcctggtttcagcagatgcgccaaccaggtgtcaaacagtccagccttctgccttctgcagcagggctaggttacttggtccagctgactttggggatgtcatagtgctcggtgagtgtgtccaggtgtcggttgaagtcctccactctctgtttgtgggtttttgatgccttcttcaggattctttccatttgccgcttctcctgcatcttttcgaaggccgcctgcgccggcgtgcgcttgtccaggcagcgcctcttctcctcctcgttcttcttgctcgtccccatggcctccagcatcttggccttgtctttgtccttcttcttcttcttccgcttcgtcacgccgagctccgccacgcctttcagcttcagggggcccttctggacctgctcgtatgcctccatatccctcac

SEQ ID NO: 154 - DNA, 606 bp, Rattus norvegicus
  Genbank Accession No. AA892345
gcacctgtttctgtgaaagacaatttattcatttgttctcagctgtcagccacattctgtgttcctagaatcacagtcctttaatcccactagaatcctgatttcacattggcaaacgcccagtgttttctctgattgggtttcataagcaccagtaataaagagtaataaaattaataaaaagtgttcatcttaaagtcctttgaatggacagtgcaaatcattaattcatcaaaccctggtgtgtgggagacaatgaaaaggtttttacgaagatactgatctagattttggtgattctgaagtgacgtcttggctatctttatcctggaaggagcaggatgccagagcagttctgccagctacacctcggttgttggtctttctcaagatttcctaccatctttctgaagcctggttctggtaggttctgtgagtaccaatggttcctgtataatggttgctgggtaatttttacccagtagttcaacctccacttgttgtcccacttcactgagctcaactgggacataagcaaaagcaggctcttctggatgctgtaactgtagcttccacatgttgtgttgccaatcagcttgcccttgt

SEQ ID NO: 155 - DNA, 662 bp, Rattus norvegicus
  Genbank Accession No. AA892367
gatgagaccccaccagctgcacaaagtactcctggcatcaggcaccttcctccttggcaatgcgatctttcttgagcggtcccatgaatgctttcttttcctccatggtctggaagcgaccatgtccgaatttggaggtggtgtcaatgaacttcaggtcaatcttctcaagagcccgacgcttggtctggaccagcaaggacttccggagagtaagcactcgcttcttggttcccaccacacagcctttgagcatgatgaagtcattggtcacctcaccataatggacaaagccacccagtgggttgatgctcttgtcagacaggtcgtagtcagtagatgcattgttcttgatcagcttaccatccttgatgaggtagccttgaccaatcttgtaaatcttcttgttgatctctgttcggtgatggtagcctttctgcccagctcgagccacagagaaggctacacgggcaggatgccaagctccaatacaagcaactttgcgcagacctctgtgggtctttcggggcagcttctttgtatgccaacgactggtcacccctttgtagcctttgccctttgtcacgccgatgacgtcaatcatctcatcttggccaaacacctggttcacagggacctgctgctccagcctctctcgggcc

SEQ ID NO: 156 - DNA, 589 bp, Rattus norvegicus
  Genbank Accession No. AA892378
gcgaagccacggcccaactttatttacactcattgcaaagcatgactgagggtaaaggacaggtaccaggggatggggggctgggggtcatggagactgtgcgggtgcacggtagggttgcaggagaaaaggaaggcggtggtgaggatggacagcccctctttcagtgtcccccaggctcccaggcgtccgggggcacagagcaggtgaggctgccttcaggatttggacttggacacagccagtccaatgagtccagccaggcccgccacacccagggccatgccaccaacaatggccatgcctaccagtccatctttcttcatggccttgtcaatcaggcgttccagctccttggcctggctgttctggggctcagtctgtaacagtccccgcacatacttcagagccttttcatattccttgagccggtagttgcccacggccaggtacaagacataatcccgctgctcctctttgctacctttgggcagcagctcctccagcatcacgatgcctctacggatgtcgtcattgtatttgcttcgaaccaggcaccaggcgtattcaaactgcgtgctcttggaca

SEQ ID NO: 157 - DNA, 650 bp, Rattus norvegicus
  Genbank Accession No. AA892382
gcagcaacaagcttttgttgttaatcacactgacatgacagggttcactggttcctgtagcagagtgcagggaagtgtgcttgctccacaggaactcaaggtcacagcctcccttcctaggcagaagggaaggagtaatttagttgaacaaaacgaatacccactaacctccagagcatactcgggaagtattggcctgtcttctggaaacccatgcccaggtagagggtcacagcacctatctgcatggtgctagtctcaaggacaacatcagtgtagccctggtcccgtgcaaactggagcacagttctgaccagtgctttcgctatcccctgtcctcgatgctgtgaggacacagccaggtggaagagctgcaactgcttcctccctgatggaggctccttgactggcagagcacccactgtgcccactacctgctccccagactcagccacccagaaacctgagccacgatcactcagataagacttggtgatgtcagccatatctgtgtgtaaacatttggacacataattcttccagggctgtccagcaaggaaccacaaaaatgggagcagaaaaaagatgcatacaacagccagcagccaggagccagacaccaggaccagggcaagggacaccccaagtaa

SEQ ID NO: 158 - DNA, 464 bp, Rattus norvegicus
  Genbank Accession No. AA892404
gatgtatatgagtacactgtcgctgtcttcagacacaccagaagaaggcatcagatctcattcagatagttgtgagccaccatgtggttgctgggatttgaactcaggacctttggaagagcagtcagtgctcttaaccactaagccatctcaccagccccaggagcatacgtttaaaactatttctgttctgtgtctcacttcatggaaatgaagaaggtgctggcagttacattgatctctcagagctgtcttacaggatctctggaagtcgtggattttattttagaaatacttttctttcctagaatcatgggctgagagataacttcaatgagggcagtgtaaggggtctcaggagacctggtgcctcatgactgcgtgctccctgtcagctggagaagacctggctgcagaatatttcaggagagttgcttagagacctcagctatgggttatataaa

SEQ ID NO: 159 - DNA, 482 bp, Rattus norvegicus
  Genbank Accession No. AA892417
  misc_feature (1)..(482): n = a or c or g or t
ccattaaaaaaccaaaaacatcactttattatgaatccaagaacactgtataaaaaacctccagtcgtagaaatgaacagacagcacgtttatatacagacactgtacatgtgggccctgccctttaagctaaactccacagactatacacatgggcactgcccttacagctatactccaaaaccaggctgctatagtcctcctgctggcacagcttcagggaatgctgccccagggaaggggaggatgcagtcagtgccgggctacaaaactctctggcagcccagcaggtggaaatcttgcagagatgctgggtcagcccaagctgtctctcttgtacctggcttccccgcaggaagctgtctcaagcttttcctttggtcagttcatctgcaaattatggcttccttggggaaggacatttttnacaagttcagtgtccaactgcatggnctcaggctctttcagcgcatctcccagtg

SEQ ID NO: 160 - DNA, 395 bp, Rattus norvegicus
  Genbank Accession No. AA892462
tgcctgacattagactctcccgacatgcaagtgttgggagctcaaaggattcttgagctgggaaatcctcaagggagatgacgtatagggagccaggcgtccaaggcgtacgaacaaggtttaatgctgcacccgtcaaggcaggagctccccagatcgatgcagacttcttcctccgtgtcctccacaggactaagctgtttctgaggcctcagcgcatgctaccatcgaggcctgtggtgggggagggggctgcctaatcgtccttcttaaacttgccattgatgtacggcacccagtccaggatcagccgccagtccgtgacccacaccagtcccacggcacccacagtgccccacatgccggatgtggggatccagtttttgggcagttct

SEQ ID NO: 161 - DNA, 474 bp, Rattus norvegicus
  Genbank Accession No. AA892468
gggctcctcaagatccaaaccagttgaaccagtttctaggacagcagcctagaggtggttactcattcctgggatcccctccccccaggtccaaagctcccttttgttctcatcccgtgaaggtgaaacctggcctgggcccagaggggcagccaggtgtaagcagacttggcccagaggtcctgctgacctctcattcctctttcctcccacagtggactctgtctgcctcaagtgggcacccccgaagcacaaacaagtcaagctctccaagaagtgaatggcctgtgcccttctttggatctgtgtttcctggcctctaacctgtaaatatgtgtacagacctgttttgtgtcatttattaataaagcaaattctgctggtgtgctggacttcggaggcaggaagaagtgctgaagggtgatattcttcatttcatttcacatccagccagttgtgttaaaaacatttcct

SEQ ID NO: 162 - DNA, 568 bp, Rattus norvegicus
  Genbank Accession No. AA892483
gacagaagttacttggattttattttatcttaatactgaaagtaaaattagcataaactacagtccaccataagctatctctctctatatatatatcaagctatagatgcatcatatttggggttgtccaaaatagtttttcctaaaagtgtgattaatcataaaaatttttaaatgaattaaaggtattaaaatataatatttgattaatactaaaaatgagaaaaatactcaattactaattttttaaccaagaataagcacttgctagtcaacctaaagagaagatcacatttatgtggaaaagaaaccagtctgtctgcggagaaacaccaccacgtggctggaacctacaggagctggccctcgccaccatacccaggagtctgggtaacaacaggcaggacacccagttcacaagagcaacacagaacaaaaagagcacccggaagtgaggtgaacagggccagctatgcctggactgagagctgaggcatctgacaagaccaggagtcacagactcactgacgtggtcagcgaccaggaggtaaacaggaagcagggtggt

SEQ ID NO: 163 - DNA, 560 bp, Rattus norvegicus
  Genbank Accession No. AA892522
aaatgaaacaaggtttatgccacacagtccaacaatgtataaagagcttgaagtagaaaagcttgtggaaaatgtatactctttacatggtacatacagttttatagctcataaataaacacagagaacaggagccattgttcacattaccgaccagcaacacagagcagcagtaacaacacaaacacaatttccttcgactcagccacaaaaacttgaaatggtctcaccatacttgaggaaaatgacaggtggtgaagtgttacagccacacccacatcaccaagtgctttaagttgtctctgggttagaaatatcaacaaccgtattaactccagagagaagaaggcagggtaagaccctgtcctataaggcacttaataaattgacactacccttgtcttaaaatactgcaaatttgccttgaaatatgctgatgttttacggcgaaatttaggtttcttttatccaggtttagacatagacataatttgaataaattgataatactgtctgatggccactctttacaccagcttcaaaatggacccatttaaact

SEQ ID NO: 164 - DNA, 613 bp, Rattus norvegicus
  Genbank Accession No. AA892541
aaaggacgtttaatgtttgctggcttacagtttcagtccattatcatcaaggtggggaacatggcagcatccagacatggtactggagaaggagctgagagttctaaatcttttttgaaggcagacaagaggggactctctcccaaggcagccaggaggagggactctcctcacaggtcagagcttgagcataggacctcaaagcccatctccacagtgactcacttcctctaacaagccatacctcctaatagtgccacttcccatgggcaaaccaccacagcatctctccatgtggttctcacttcatgcttccagctccttccagctctcttctgccgccttcttcccttctgcctccttccaagtccccttggatctgcccaagtctcctgcatctctgaagttatgctccatacttcctgccccagctccagcggtcagctctttatcaatcaaaaagccacattccagcttgaaccaatcagtagcaggacagcgcccaatcaatctcttagggttgccctttggcactgaggactgcttgaccttcaccatggcagcttgccttttaatatgatagtctcagaaaatctttctggggtggtgggaa

SEQ ID NO: 165 - DNA, 605 bp, Rattus norvegicus
  Genbank Accession No. AA892545
aagaagaagaggttcttaagtttattgcttgactgggccaggtcgttgggttttgtggtcaccgggctttgtctcccttctgggacaatggtttcttccagaggaccaataggacaagcaagttcaccatgagttgcacatggcccaagatggagacaccatagctccggtacagcaggccacccagggtgggtcctacagtacgggtcaatggatgcacagatgcacagaggcccaacatggtccctgtgtctgaagcagatacagccttggtcagcatgctgtctgtgactatgttgagagcacagagactgaatacgagtccaggcaacaaaaggcagaagtggaacacattggacatcagtgccatgcccaggcccacaacagcaaagactagtacactggatctcagcagggcttcctctggaaaacgggtgcttagtctcccaataaccaggccttggatcatcatctggaggatcccaaagaaggacatgaggtagccagcctgtgcagcctccagctggaagaagtccatggagatgatggagaacatcaccatgaagagtcctgaagggaagccagagattaccttgaccaggaat

SEQ ID NO: 166 - DNA, 644 bp, Rattus norvegicus
  Genbank Accession No. AA892549
gagatatattaaaagactttattcacaatagagaaattttacaaatataatttttaaaaattatgtgtcaatctattatgttttccgtaacatcagagatttatataaagttggaaacaacagaatgcacttatgaacaaatcaaaaacaatgtagaagtggatggatacacacgacagagaagtcactgagttctctaaatgagcacacaacttataggtataatattaactgcacaaagtataccaaaacatgttttgtaaacacaaaatcgggtgctaccttaactgctcacctttaagggcgtggatcatacatgtaagtcaaattgcacagctttgttggaaatgaatgactcgtcatctatttggagacttccgttgcttaaaattgacacaagataaaagcctaatcaattacgctactataaaatttgtctcttatcgcgtttaaatttttggtgttctgtgatctggcattaaaaaacagtccaagttttaaaacagaaaacattgctcgccagttggagagtagctcgtggttcggcttcctccctgctcgaaccggaacaaacgctacagtaccgtggagcaggcgcacaggacctgacgttcgcgtcccaaccgctacagaaatactcacca

SEQ ID NO: 167 - DNA, 465 bp, Rattus norvegicus
  Genbank Accession No. AA892561
aagatttacttgtttattttttatatgtatattcatacactgttgctgtcttcagacaacccaatagagggcatcagatcccattacagatggttgggagccatcttgtggttgctgggaattgaactcaggacctctggaagagtagtcagtctcttaaccgctgagccatgtcttcagccttttacgggaaaggtaaatggctcctttgttaaatctgggcagtcgaccacagagacctggacatgagcaaagttgtcctttagccccttctgcaaaacttctgcgagctcctccagacttggcacgtggaaagaaaactcagtgcaagccattctctctcctctcagcaactcagacacagcagctgttggctgacctccaccagagttcacagggcaccagcgtgaacagtccctgctcttgtcacccactgaataaggtgtttgtaatcttccgttagaa

SEQ ID NO: 168 - DNA, 443 bp, Rattus norvegicus
  Genbank Accession No. AA892572
acactttaaaaaagatttaatgataaatacatattggtagaaatggttaaattcttgaatgaagaaacatctgaggactttctgcatcatggctcccagcccttccctccaggctgatggggcaactggaggcccaccaaaccagcagactcctccactgagcgctcacccttgccatgaaattcctgatgaagggctacatgttgccggatactacgcaagaggcagagataggtggcagcttggaagtgaagctcgtgttgggctctgcacaacttctcactggtgacccgatgtgctcggaaagccttaaccaggtaccggtaggctgctgtgtcgcggtatggtcgcccggtggccgcgttcaggtagcgcagctcccgcagaaggcctcgcagagtgcgcgccggcgaaccccaagccgccattttcctgtccttggc

SEQ ID NO: 169 - DNA, 512 bp, Rattus norvegicus
  Genbank Accession No. AA892582
  misc_feature (1)..(512): n = a or c or g or t
attagccaaagcacatactttattagctcctgaactctagttctccttctcctgtacagttttggttccacgtagccgtccagtccggcgagcagcaatgagacccactttgcgcccagctggggcatctcttcggatagtggaaggcttgccaatgtgctggtggttaccaccgccaaagggatgctccacaggattcatggcaacaccccgcacacgtggccagcagttcctctttgccttgtacttatggtaggcacggccagcctttaagataggcttgtcaattctgcccccgccagccacgacaccaacaacagctcggttagcagaggaaatgaccttcttggaccctgaaggcagcttcactcgggtcttcttggtctctgggttgtgggagatgactgtagcatagttcccggaggctcgtgccagcttgcccctgtcnccaggcttctcctccagacaacacacgatagtaccctcaggcatggtgcccacgggcaaaacat

SEQ ID NO: 170 - DNA, 658 bp, Rattus norvegicus
  Genbank Accession No. AA892598
acaaacactttttattttgtttttaatttagaacatgatacatattcacaagatttacactttatatcataccaaagcaatctagaaacactgtacagagcacacttgaacatttagaaggctatatataatctgtggtaaagtcataggcatcgtcttcttcactcattttatccaagataaaggatctgtcagatggtttacttgctgttgattgcccaggtgacatctccctggtctcttctacaggagtcacatctgagatctctgcatttttttcaccagtaacatgttcttgatcatcaccatcctgttggtcttctgtctgttttggtgactcttcggggatgtccttttcttctagtattccatttgtcaggcccgaagaccggaaaaggattttattagttaaatgagggcccttgaggacttgtatgctgtgtgcattattcttttctagttcttctagattaaagcccctcttcatgattgctgtaatattctcattaaaatgaggagaatgattccaggatgcagggggatggcagtagtaacctaatgaggcacctgtccactcagaccatagcagcttagcagcactttcgacatttgggcttccacctttttggtgcagacctcttctctgagcaagtttagt

SEQ ID NO: 171 - DNA, 487 bp, Rattus norvegicus
  Genbank Accession No. AA892666
aaggtttgtttttaaccgttgtggatgtgtacgtgtggaggtgtccccggaggctagaagagggtgcttgctcccctcgagcctggcatgggtggactctggtcctctgctcttcactgctcagccatctctgcagctccggagaagaaggctctgacaggacagggcccaaaaccctgcttgtccttcagtggccctaggaatgcttaggcagactgaggtaggggcacagaaggggaacctgaattctcatagctcaagacctggttaaaacttctgcgggggtagtctgaggtaaaagagaaggcaggaaaacagttctgtcaaggaaaggaaggcttgaagaaaacagacacaatggagccaggacggagaggtggagcctatgaagtcaggagagtccagaggaccacttctctaccaggagcagaccttagtgatgacagagaacagagctggtcgttagacacagcctacagccagctct

SEQ ID NO: 172 - DNA, 606 bp, Rattus norvegicus
  Genbank Accession No. AA892773
aatgaccagcaaacaatttattggttaaattatcaatcgtggagttccttgataacattatataacaaatggattaattcaccagaaactggcttgaagatactgattttaattactttaacaaaatttggtttgtgtagcaagctcctactgtcactgctagacagtgaatgcagcggctatccaaagccagtcattccttgaccacgggggtctctcagagcacaggtgaataccagttacggttgtgtttgctgacctagcacctagttccagccttaggactcagaagcagctggacagaagatatggggggaggggagatgctggaaacgaacagctaactcgacttcgggccggtgttagatctgaggcaactcgcaggctctgagaccaaagaggaacacagctttggatgtggctgtgaagaaggcaggccccgggaccgaattggtgggtccagaatacagtgccaggtgggcatcaggaactacggggcttcttcttggcttccaggtcctttttaatctcctcaagttttttagccaggtttggcatgtcgtaattctggggccaaatacattccaaccacgttgcccaaagtaa

SEQ ID NO: 173 - DNA, 562 bp, Rattus norvegicus
  Genbank Accession No. AA892796
cttgcggtagccaaactttttttttatttttttttttttttttttttttttggagaccatcccatgtcctttattgggccagcaatgctggaagctttgcaaagagtgaggtccccgctgggatgtctgtggcatcttggtcttgactcccataatgctggggggcaaggtggcatccattacttggtgtgttctttgacatactcccagccctccctggagtattctcgagccttggagggggccacggacaaggctgccatgaccgagatgatgcctgagttccaggaatcacggaagttcggaaagttaatctttggaggggctgggagctgtgacatctccagacccgtctgctggcacacatattggctgaactggtacattgctggtggcacaacttcctcggccttccgcaggacagcctcgctcttgtcactaggccccagcagctcctggtcataaacaaggtagactgctcctccagccacacttcccttgatgaggaacctcattagcgaccacactcgagccaccatggtcggtctctcacttcactcgc

SEQ ID NO: 174 - DNA, 694 bp, Rattus norvegicus
  Genbank Accession No. AA892798
cttgcggtagccaaactttttttttattttttttttttttttcacacttataactttattttacagtatctgcaagcatgcatgtcagaggcaaagacaacagcatttagtggatatttatgtttattaaaagaaaccgatggcaccgaaggtcaagctgccttctgatttcatggactaaataataaagtattacataacttcagctttacagggaaccacgctaatgacaaagtgtatgaggaaccgtgtaatatataaggagtctaaaatatttatttttacatatctacaacatgtattttcatatttctagaccaaccacaaatcgtattgggaaatatttaggtacatgaaaaagcttcaaaatataaaaaaaattaacatttggaaaaaaaatcacatgcgcgagctcattaaataacaacatcgacaaataaataaccggctttacctattagctgctgccttgcattgctggcattccactccaagagaggtcaacacgagggggataatttcacactgagactggaaaatgccaccgggcttatttttgaagtgaaatgtcacaaggtttgcctctctttcaaaggaagctaacccctggctgtcaaactattcccataaaaactactggaaaagcccctttgtgaaatgttctgtgaagatacattttttttttgattgaact

SEQ ID NO: 175 - DNA, 409 bp, Rattus norvegicus
  Genbank Accession No. AA892799
ccgtgtcagaaactgtttaatgttagaattacaggcttttggcaagtatatggcaagcccatctgtccgttcccatgtccactgagaacacagcagagggggcatgccccaagctctggcctcagtccagacttcagcttgggtttgtccagcgagatgtctccagtccatgaaagcccatctggctacagcttgagttcactgggcattggctcccctcttaggccagctgagcaataggcacaaactctgcctgaaactctgctgcttcctgaggcctgggctggcgccccgtgtagagaaatctctggacaccaaatggtttcagtcgtcgagcaatggcctgggcgagcgcagccctgccctgggccggcaaagggccagtgacgaacaccttcatcctcgtgcc

SEQ ID NO: 176 - DNA, 503 bp, Rattus norvegicus
  Genbank Accession No. AA892821
aggtcggacgcctgctttattcagacgggaaaagagcagggagtggatggagaccagcagaaaagaccacactaggtcagcactgggcaaggagtggccagggtgtgactctaagagttggcagaaaagccctggcgtcttgagtcacgacagtctatctgaagtagttgggacactcgtgggcgaccacgttccaggcttggttaaaggcctccacgacagcgggctccaggggaccttcctcagtggccgccaagttctgctccagctgctccaggctggacatgcccaagatgactgcgtcccctcgggtgccctggagctgtgagtgatggtacatccagcgcagggcagccgaggtcatgctgggggcactggtgccataggtggtcttcagggccttttctaccagggcaatggcctcaaagtggtgttccttccagaagcggttcctgtaggtctcagaccagctattcccaaagaagcggccctcgggctgtttc

SEQ ID NO: 177 - DNA, 634 bp, Rattus norvegicus
  Genbank Accession No. AA892829
tttttaagccaaaaattaattttattgaatcaaggcattcattcagcacttaacacagattgcaagaatacctcagcatgtaggggtacagggagagagggaacggtttacatttatgatgtaaaataaaaaaacctaatcgctacagatagtttgtaaaatttgtaaaactcctcgaacaaggtctagccaactttactgtttagtgattttccccctttcttaaaggacgagaagctagatgatgtgtgtattactggttataactaataaatcagcttggaaaatcctaagacagaagcataaatacaatataaaaaggcgagatttttaaaatcgtattataagaatattaacaataagtggaaaagatacattagaaccagagcggtgttacactagttcaaaacagaactcaaaggcaaaacaaagctgatgcacatggagggaaacggcctgatttcaggaagtgtgtccagacagacacccacagagaagtgctgtcagtgactgcgtggtcccctgtgttgctcagccctgcatccctggcagagtgcctggctcaggaagttaggctttctctaaggacttgtagtactccaccagcacagtccacgccttgggggccatgaag

SEQ ID NO: 178 - DNA, 600 bp, Rattus norvegicus
  Genbank Accession No. AA892843
ggacagcagcagcacccaaggcttctttattggtgttttagaaagaaagggtggacttcagggtgaagcagtactcttaaggctcaataccaatagattttcttgaatcttcgagtctcctggatccccatggcctccatcacatcttcttctaatgtctttagccggggcacgtaagttctttctaaagcatcttccactgatgtgtccttggggccatcagtccatgtttcagggacaatgccatctgctctaggaaattcaggtttggggataattctcccagatcttgtagagacacgaacacgctctcctgcctcagtaaatctccactggatctcagtaggtttcctgtccacaggatccactagcttgacttggtgatgaagcaagggggcttcgctagggatcatggtccctcggtgatccttggttctgccaatgtagcggtaatgcgtgttcaatccctccaggacaacccagttccgctgccgaacaacttggactactttgccctgcttcccagcatccttgccttctaagatttccaccatgtctccaaaagaataggtgccagtcttcatcagagatggggtctac

SEQ ID NO: 179 - DNA, 436 bp, Rattus norvegicus
  Genbank Accession No. AA892860
ccatataataatttaatatatgccagccaaacaaagtagtttatctttattcaattaaataaaaacagacctgtcaggtatattatataacattcactatatacacatgatttaggcgatgcaaggtaattctaggtatgctaactgttcaactattagtgaaacacagaaggtgtcaggagcccagcgtgttcctgctcacattgggtgcctgcgtttctgtggacagttagagggacagccacaagccaggacagatattaccagtaaacgtctgagggacagaggggctggggatgagtctagcagagattaacagtctcctaagtgtggatagcatacttgacagttacgctttaacaagttcctcttcgatcatgttcatgacgtcaaagtttttgtttgaaggcaacaccaccacattttacctcgtgcc

SEQ ID NO: 180 - DNA, 515 bp, Rattus norvegicus
  Genbank Accession No. AA892861
caacattaaaatagatttattaattactggtgaaaaacatgatatattataaccaagtcatatactttattgaaaagaaaaaaatattcggtaagaagtttggcacggtcttctgctgggacctgtgtgaaatcccaggacttgtaggtcggggctgccttcgtgaggggtgtcaatgcagcccaagaagtgggtaaagtaggaagtgggggtcaaagaaaggcaatcaagaggtctgctcacaggggccttttcccacgttcatgcactgtcaggctgtatcctgggacagcggggagcctcggagagttaatgagaaacagaattgtcactttggcgaccaatgtcagaaaacaggttcctggtcaagcgttaggtactagcgaattctgaccctgagacttgaggtgtcactgtctttaaactgccaggcatggagggaagtgtccaaagatgggacttatagagagaagtggtcccggcttcctgtagtctccatctcaccagccccaggc

SEQ ID NO: 181 - DNA, 541 bp, Rattus norvegicus
  Genbank Accession No. AA892916
caaaattaagaccagtgtataaacatacttgccaagaaataagcaacttggagcttattacattagcacaaacattacatcaacagttcgctaatcacatctgtgggtctaaaggaatcaggccgtaaaagggcatctctaaaacacccctgggcaggtccaaactcgctgggtcacccaattacagtggagaaggcagtcacagaaagaaacccaatgaaatcctcctggccactaaatgggagtcttgaaaaccctctggcatgaagagacttgtagagagtgggagaacacccctttactatggaggaaaaccaggagtccaggtattctcacacatctgacatggcccctgagaacaagtttcagcttgcataatccctgcatcaacacatgcattaccactaaaaggagtcccgttgggtcctacccggatgcccaggggtctcccacaggtaggttcatcatctcgggttttgcaagggcccgaaccaaaccgggcgatggtctctatttctccattctccagttttacaactcg

SEQ ID NO: 182 - DNA, 544 bp, Rattus norvegicus
  Genbank Accession No. AA892921
actattaaacttcaaaggaatttattatcaaaattaaaaatgaagccttggttctagataaaggcataatcccattcaacagttgtcaaggagcgtgtgtcggcagagtctgcacacagcactgaagggcaggaggaagcaataggtgggctccagttggaatgttgaatatattcagacagcggcctcttgagttagacagtcatgacacactggatgaaatcatcgtacgagaaattcacaactccttgttgaccagaatcccgtctgcggaagctatctgtgagagccctcagtttgacacagcaggctatgtagtcatcaaaggtgatcttcccgctggtgctgtaccgctttgctactgaattcacggtttgggggctcaacctgaaccccatagtggttagggccttctgcagctcctggggatccactgtcccactcctatcactgtcgaagctgatgaagtgttgtctccagccactcagcacagtccagagctctctgaactcactgaatcccatcgtgccagacatatctctat

SEQ ID NO: 183 - DNA, 441 bp, Rattus norvegicus
  Genbank Accession No. AA892950
cgaagaaagaaccaaaagtgtctactgtataaatacaaaaggccaaaaccgtattaacataaggtaatgaactaacagagactgtccattagagtgcggaggcctatgccttcccagctgacgccaggtacttgaccaggaagtctctcagcctggatatgtgcatcatctccttcatcgtggtgtctcggcttcgaagctggatcagcccactttccaaggtggtttcagtgattagaaccgtgaagaggatactcatctcatcgtactttgaatagagttgctctaatgaggactgtgcagtttccaaataaccaggccacacagcaatcccattttctagtaactcattgagtagcccttggcaaacctgtcggagttccacggttgggcctttccccacatctagagccaccttaataggggctaaacaagggtgaa

SEQ ID NO: 184 - DNA, 465 bp, Rattus norvegicus
  Genbank Accession No. AA892999
  misc_feature (1)..(465): n = a or c or g or t
gagtggcagtgatttattgcatactcacatatacatacaggctgacggccaccctgccttcctagccaccatgtgagtacaaacacagttcttctggaggttttatctctatgcccttccccctacagtgggacttcttggaagtctgaaaagtggaaggtcacagagacccatgtagttgggagagagaagacaacaactatgtatgtcttgactgaggcaaaagagtcttgaggccagtggtaatcgagtcctgaacccaaggtcctccagaaaggttttcaccaactatctgatatgacatcaactttacccttgggtgtgggcagtttttccttctccttgactctcttctagatggctggcacagacagtcaggtggggctgtggttctgcactcctgacccacaagaagctagggagtaagataaccatccagccatagctcctgggtcatggtangaa

SEQ ID NO: 185 - DNA, 482 bp, Rattus norvegicus
  Genbank Accession No. AA893000
aaggaaacaaatatttccctttatttgagtgtgttacatctactcatgggatagtcataaaaactgaaatctttaatttacaggactataaatgatgccacttaactgagaaccagccagcaaacagtagcatctgaagaccaccactcctggagggttccccacaccaagtcagcctagtagtgactacagtagattaggagctaggagtcagaagaacaatgcttgaggttataccaacgggggtttccttactcctttgccagctgcacattggtaggctttgctccaatggggatcccatatttgtgcaaagtgttcatcaaaatctccctcatgtcgttgttgtaggaatcaaagtcaaatacattccgaaccacactggagaggccttcagtagggaatttctctaagtgtttgacaatgttgacaacttctctggtagaataaggatagttgataatcccttggtcagccaattt

SEQ ID NO: 186 - DNA, 416 bp, Rattus norvegicus
  Genbank Accession No. AA893060
aacattaaatagaagtgctttattgagaaagatgtacttagactcaatagccaatccgggtttctatcacacagagacacaaggactaaacataggcatggaccagagatagcagagaatttggttggcctgtaaccagaccacaagggaccagaaaggaacctccattatgtacacatcaggtcatatatcgatggctataaatacccagcagtatccttgtagccgaggcttcagaggcctaaaggtgggacccactgaaacaactagtgtggcactgttcctattctcacagggccaaccctcatcccatgactctgtatggttcttggggtgattgtactcgggatcagtgtgtatagaagggtgtaagagggctctatgattcaacaataggagctgcagctttgtggtgg

SEQ ID NO: 187 - DNA, 424 bp, Rattus norvegicus
  Genbank Accession No. AA893080
aacttctgacaactgtttccacatgctgcgtcatcctttggcccacagacccacgtgctaaaagtgtcctccaagaagacatttcctatataaacatgggtgtgatgtgtgccacacatcctcaagatgacagaaccctttgcagataaaattaaaattgaatctgagtgagaaatgaccggatttcccactttggcaaagatcaggcagcagcctcccggcagccatccctgtgtagaagacagggtgagctgtgacctctgggaacaaggcatgagacctcgtctggggaccatcaggccagggaggcaggtgggcagtggcaggctgagggcagaggagaagggcagggcagcatgggggaggggtgttgtctgtacgtgcacacgggaggccatgggtggagacgaaatcaacttcctat

SEQ ID NO: 188 - DNA, 479 bp, Rattus norvegicus
  Genbank Accession No. AA893082
  misc_feature (1)..(479): n = a or c or g or t
aagacaggatgtcagtccctgaaaataacatttactggttattgcctttaaaactgtggattttttttaagttacagaaaatccagttctgcaccacaatacaactgtaaaaaatctgcatcaccttaaaactgtgcagtaatgccattttataactgcataaattttattagcgttctaaacagttttgcgattttttttttgtattatatgcttgcaggttatatcttagtgcaattcagtcccaaatactttaattttggaaaaaaaacatacagtttgaatgtaaaatacccctacagatataagcaggggcgtttcccccttttaatactttggttttcaatacagtccacggtatagcaagaactacacatacccaacttatatttaagttgcaagcacatgcttcagaagctacttttaaaacagtcnccttgcaaactctaccccccttaacatcacaacagtaaacgatt

SEQ ID NO: 189 - DNA, 499 bp, Rattus norvegicus
  Genbank Accession No. AA893147
cctcatgatacaaaatttattccacctggaggactgtcttacactctgagattaggtcttccctcctttagtcccaaaacattgatgggatgacatcgaatgcaggggacagtttatatctctacgtgctccctggcaacttaggaatgtcatcgttctatgttggtcactgcttccattcttagctactgcactgatttagaacatccaaatatcagttaatctcctgtgtagaaaactatgagtcgaatagtgggtggttaccgttctattaggaatgaattgaaattaatcaacatacttcaggagagggcttcctgaaatctttctattttgaacccgtgcccatatcatagttcaataagtcgatcaaattagtcataacaactgcctagtaattaactaaatactcctttgtaacctctgacaatttaacaggagtgaattttaaaatagcgatatatacagatggcgttgtacaaatcgagaaggtcctgat

SEQ ID NO: 190 - DNA, 545 bp, Rattus norvegicus
  Genbank Accession No. AA893185
cacaagttcccaggcctctagcttttattattgccctgtaaaccgcaacagatgaagctgaaaggaccaagagaacaaacgcatcacctgaaccacatgaagaaacagccacagaagcttgtgtgcatccgagtgaaaatacagagtatttattcctttcttcccactagaggaacagacgaatcatcagttgtcaggagttgattttggagaataatcaatgaactccttttcaggggttggatattgataccaaggtccatcaccccgggcacgcatcagtcttcgaacctccagctcctttaaccgtaagtcggccttttcagactcgatctggaggatagccagggtcttttcatagttcttttcaggtccatcgtagaaagtccgggcaatccatcgtgatattggatgcttgtaatactcccagtgttctgggatgtagccttctgggatttctgcgagttcagcttcaccaataaatatgttcaccagtgttatgccgattataactgggatcccagtcaacaaaaggtagaatttca

SEQ ID NO: 191 - DNA, 626 bp, Rattus norvegicus
  Genbank Accession No. AA893192
caaagtagaaatttaattcaattaaagatcaaacaaagcaggtgtttgtattggtctaaatatttgatccactctaatgaatattattcttctcaccgctaggcatttatttttagatatccacaaacttcattgttaatttccctgtgaataaaaagataacagagaaccaatgtttagctcccgccctcaacccaaagtggctcactgtatgggtcagagggtgcgtctcctctttgtcaggggtcacgagcatcaaggcagaagacatggcttgtggtatacgttggtctgctgccccgtggtctcccaaatgaaggacaattttcgcagagtcatcgagaaggtaaatgcattgggtttctgaagaaacacaaaactttcttcaggttaaacactccattgttttgatgactcttctgaatctgtttccaccaggaagctgtctagataacatccagtacgtttactacttaactcttctaccagtatattaacatgaggctatgtgattcaaagtaatatctaagggattctggaaaatgttaggtttcaaaccagtcaactacagaactacttactaaatactatgttacaataagatttattgacctaaacattattac

SEQ ID NO: 192 - DNA, 684 bp, Rattus norvegicus
  Genbank Accession No. AA893206
cacagttcagcttttattaaaacgccgtgtacagtgtggggagctggaatgggctcctgtgaaaatgatacgtttgaggggattttcccgctcttaccgtactgatcacgtggcaagtgttcttttacaaggtatatggtccctaacatccatgcagaaaatatcaggtcaagtgctttactgtcccagtgtccagtctggtgacccatatcagaggcagggcattcgcagagatattctcattccgtgtcttgagttttctttcgaagaaagtattttacgagtcatatacaaattaaacaagaagtccaacgagggccctttattaccaccaagggggggaaggggtaacttacaatcttataaccaaaggcaaaaacagcacaagaacagtttattcctgcagatgccgcagccctgtgcaatcccgcctcggctgctgctacagccagaagtcagagccccgcagtgaaggctgcacgggaactctaggctggattacccacacagaacaagtcgctcctgcccccgtacgttggaagtgctgctggattttctgcttgctcagtggataacagtgcagctgaacatgaggggcttaaatagcacgctcgcgcgcacacacgcatgcatacacacacgtgcacacacacacacacacacacacacacacacacacacaca

SEQ ID NO: 193 - DNA, 646 bp, Rattus norvegicus
  Genbank Accession No. AA893230
gagttgccacgcatttattttcaagtcatcatcgtcatctttgtgaggtccaaaggctttgagaagtacagtgggtgagggggatgacgttgcagaggcagcccgtccatgctgcaaagggctgggtaatgttagtacggaaatccagacagacctcctcttacaggcaaccagtacatggccacatcatttattggtattcaccccctgcaggggttgtgccatgtggtcttactgctgtgttcgccatctctagacttcccttacaaaaaccttcagtccaggttttcaggccccggaggctgtcatcctctgctcccttgacctcggctccctagtagtctcgcacgggcagggtgatcctctggataaacgtgtcatatttcacttggccgttaggttcgatgcccgcttccttgaaaagctcatccacttctttgtgagtgagcttctctcccagtttcatgagtttcgaccgcaactcagacgccatgatgtaacctttcttctccttgtctgtcatcagcatggccagaaggatttctttctttgggtcctcttgcttgatttgcatgtgcataatggtcaggaaggtggagaaatccagttctccgttcttgtctattccatgagtctgcaggtgccg

SEQ ID NO: 194 - DNA, 480 bp, Rattus norvegicus
  Genbank Accession No. AA893280
gggtccaaaggtgatatttcttcacatggaaaaaaactaaattcaagccacacaagaacatgccttgagggaaacagtgatgaagcctgctcggaccacacaggagcagatgcccattcagagcagaggccgcatgaacaaatctttattcggaacagacagacgtttacagccaataagaacacaaaggccatggacaagactgtaagcgcacctgagctttaaggttctggtgaggtcctcacaaaactaacacactccacataccagccgggtaagaagaactcatgtgtcagggccagcgggggcacgaccataagtgagctgtgaatgaccataatgaggacctttgttcacactagctgcttttctaatctaatcaggttaatttcaatacagcaaataaccgataaaaaataaaaggtgccacctggtcagcaacatcatacactggtgacaagagaacgttactgagttgtg

SEQ ID NO: 195 - DNA, 296 bp, Rattus norvegicus
  Genbank Accession No. AA893289
ggtggtgcataactttaatcccaacacttgggaggcagaagcaggatgatctctgtatgttcaaggccagcctggtctacatagtgagatgacccactctcccccgtaccccagtgaaagttctgaggctgcagctcagtcggcggagtgctttctgggcatgctcaaagccctgggtttgaaatctagcaccacattaaacctggcacactggcacatacttataatcccaacattcaggaggtagggaaaagagaaaatttaaggtcatgattatatacttattgagttcttta

SEQ ID NO: 196 - DNA, 434 bp, Rattus norvegicus
  Genbank Accession No. AA893357
aatatgcgcgcccaggctgccaacggccacactgggtcacgtgtaaatctgaaaacatttaatgctctttcccctgggtttcacgtataacgcaaaacagaaatatttcaattacatgtgactaagagtaagaaaaatatacaactctatttaaaacacttaaattaacaagaaagggtttttccattctagcaaaatattgtacatttggttttaaacaagagttaatatccagacatacattttcaaaatacctgatgctagttgaaaaatcagtgaccatgaggccttccaagatatttctaactagcaaaactgtgcacacctgggaaggcctgaaggcttttcccccctagaacacagacatcaaacaggccaataccgcaaactgaccgatgcctctaaatccggttgcttcagcttccggaactacg

SEQ ID NO: 197 - DNA, 512 bp, Rattus norvegicus
  Genbank Accession No. AA893436
aacaaatatccagtgtgtttaatgccacctcaaacaaagacaccacccacagagcaatgtgaaaccgaaggcaacacatgacaggctcactacatttcatcaatttatacacagaaataaaaatccagctaccaagaggtcctctcccagagtgccggtcgcctccgcgacattctcccctctccctcagcattcgaaccctcttactaagagaggtagcttgtgcccaggctctattccagtagagctggagaatttatgacacactaaaggaagccaccagaccgggcttccgggcaacccacttctgtcccgttcctccttttctcttgcttagaacacaaaagtgaccagcaggccactttgtggtctcgtaacccaatattcaaagccatcgtgcttctgatctgaagtgttttctgaaggttgtggtgttcagctgataaggcctttcgtaactgattggatcactatgcaatgaaggaagggctcaggcttcctcagcaagttaa

SEQ ID NO: 198 - DNA, 561 bp, Rattus norvegicus
  Genbank Accession No. AA893626
acattaaaatatgagttacatttccaataaaacaggaacaatttatattgtatctacaaaatttctacaatatatgctgtactttaagtgtgccaaaaaagctgaggaatgtcctatcaaccctgcgtagtctgaggcactggccctgaagatgctggtgtttaaattgggcagtcatagacatggatctcctggtcatctccaacagacacaatttttgatccatttccattatattttactccccaaacctgatcctggtggtcaaagaaggtgtgaatacaggtccttgttccaacatcccagacctttacacttttgtcggatgaactggaaacaaagtgagtgtcatctggacagaacgcaacattcaatacccaggatgcatggccactcagtgtgccagccaaattggcatgttgcacatcatagatcttgatgtagccatcatctgaagccgtgacgaggagctgggagtcaggggaaaaggtcaaggatcgaatgggcatcgcatggccttccagcgtgtgcagaagctttccagttgcaatatcaaaaata

SEQ ID NO: 199 - DNA, 401 bp, Rattus norvegicus
  Genbank Accession No. AA893643
acaaataaagcgctttatttatacagtctctccaggccccagatctctgccgccctaccccaacctctcaagaagaggactgaataattcattccagaggagccaagagtggctggtccacaggggggtcttcccccgacagctgcaggtcctgagtagctgggccaggtagagagcaaaggcacgaggccctgggcatcccatgccagggcaaaggccagaaccaccaaacaaggtggcatgggttagcataccagggtcagctccctgggatcaggccaacatctgtaccaccagcaccacagctctgctcataggatggtggagcctcataggggtagccccatgaactgtactctggaggaaggatcaaggcgctggtggtaagtactgggccccca

SEQ ID NO: 200 - DNA, 472 bp, Rattus norvegicus
  Genbank Accession No. AA893717
ccacataatattccaaatacatgtcttacagataagggttagtatgagtatcagaaaacatcccagggaaggaagccattttagacactggaaaatgctaaccaaaaaaccaatgcttacatacacatgtctggaaaaagctcaccacctaaagtgcaaagacagaagcaactaacgttctcgctgtatgaaaatagacaatcttctgaactattagctggctttttaaataggctccactggacaaaggacaaagggtcagtcgtcagaatgaatcaggctttaaaccaatctggctttgaccccaatcaactgcaaacaaagtccaggttgaggctgactagagactacacgccacgtgggatcatagcctctagcactttctacaactcagacttaacccagttagaagtgagtatcctcagatcagtgcctcggcctacccgccgcacaaggctcccggacatgtgtc

SEQ ID NO: 201 - DNA, 419 bp, Rattus norvegicus
  Genbank Accession No. AA893860
gaattcatacaaaataacctgggtacagaaaacatcctccatgattttccattttggagagagacatttaatggcccccatctaacagcattctctaagacttgtccagaccagaaaggctgatccacgaagactcggcagaaccactccttgctcatcatgaagccatgtttcccagtgcacaaggtcacgtgatgggcacccatcttcctctacactgatccagctcgggccatgtgcctgttaaaactcctcctctgcctgcttactgcgcaactgcttgagctgctgcagccgctccactgtttcccccacagtccgctctccgtggaccttgttgtctctcgtgcggatgttcacagtgccactggctttctctttttcaccaacaacaatgatgaagttatactgtgccaact

SEQ ID NO: 202 - DNA, 486 bp, Rattus norvegicus
  Genbank Accession No. AA894008
gaaaaatgccatacaagaagcaagaccaaacacttacctaaacactacagccacatctgtcactacaaaggtgcagacagcaggctcagttactgcctatctcacctaagggaggggtttttcggctggactccgccggcatagttcctattttgtcaaatgtaaacaactacttgatatgattcataattttaaaaaaatttacaaagctccttcatttttgtcatgaaaataatatatctgagagatttgtaaaaacaaccagcctagggctggtatttcccatgagcatcacggtgctggccaggctgtagccccagctccattcctcaaagtgggccagggctcccagaccccgaatacactgctggccttggggagggcccccggagtcagcctccttgagccctcagtttacgaatatagggcttgctttgtgggtgggtggcagagatctcatgtggtttgaaggaaatctacttctga

SEQ ID NO: 203 - DNA, 555 bp, Rattus norvegicus
  Genbank Accession No. AA894086
aaatcagaacaaatgaagtagcagcaaaagaaccattcggcaatctggcttcactggtcctcaaacaaggagggaatgcagccagagatacatctctcagcctcagcctctcagaatctcacttgggccctaaagtgcatctgcttggtggcattgttcttcatcccggtcttcagcatccatttcgacttcatcctctgtacatactgcatgtcccgttcacgcatgagagctgctcctaaaatcatagaagtctgcaaactccagcgcagcatcaccatctgtaaagagcttacagtggcttttgtcattcatgtgtgcctgcacagcttctgtggaatagaaggacttccctttctcattgcaccacaagcagattttgccaacaccaactttctctcccaaatatttaattaatcctttcaaatctgaaagatactctatatcaggaataaaaaagctgtggactttagtcatatgagccacattcttcacaagggagcttgaatgatgggaacaacataagcagtctgttattgggatggcacctaaggg

SEQ ID NO: 204 - DNA, 580 bp, Rattus norvegicus
  Genbank Accession No. AA894099
caagaagggaaagggtttattagacatctccaggacaggaccagcagaggctgggctcagttctcagttctcagtgaaggcagcgataaagacctgcctgtctgccgtctctcctgatagaaacggcattgtgctcacagaagccatcagctcctgcaaggaggacctgaagctccagatgcaagcttaggagggtgggatggcttttcctactttaccacagtcagctcacaagtagccaaagttaagaggaaaggagtgagagcaggggcctggtggctcccactccttaacactttccagatgattttcctctttatttataaacaagacagaaatcaaagcagcattaatttaggggaacaaaagttagacaaaaacagatcagggcagagtgtgagcatccagtagtgaagtgtgcagagccagtgtcacgtgtcctacatggtgaagcatctctgcagctgccgaggcccctccttcatcctactaggtcggcagccaggcagtagagggaatactattgacttcacgacttcaggccctgcctggccactggtgtgggaagtcccatgaattt

SEQ ID NO: 205 - DNA, 630 bp, Rattus norvegicus
  Genbank Accession No. AA894207
  misc_feature (1)..(630): n = a or c or g or t
aatggagtgtgctggatgtctctacagttttgttcagatgactacagaacctggaaaagctgttgctgctgttgatgcataacacactgctattattggtctttttatataaatataaatatatatatacagataaataatttgaattttttgaaactttacctgtgctgtcaactttggaaaaaagtatccccgtttactgtgttgagttggcactgtaaagaaattaacagccatattggtctagaaatgttgaacttgagttttttccatttgtacaggggtaacacactgtattaaatatgtaaggtcttatctacgtgggtttgattacaaaaactaataaagtattctctaaattaaaaaaaaagatgtatgtgtactaagggctgagtcacaccactagaaatagtttttttgtaaaataaataacttaatcgtggggttcacattgagatcaaatatcctacaacaggtcggtttccaataattcctcaagacgtcaagtagcgactagctcctttccagcaatccagctctgctctgatgccatgtacctagagaccacatcacagattcacagaagcagggtgagggttcagcctanaggagtgcccctctacctctgac

SEQ ID NO: 206 - DNA, 407 bp, Rattus norvegicus
  Genbank Accession No. AA899289
  misc_feature (1)..(407): n = a or c or g or t
catggtcagcatttctactcgggaactggttaactccaaccagaaacgaatcaggaacatgattgcacagctctgggcacagtgtctgaacagttcagtcccagtccccctcgccctcaggattgtcctcccgaggcacctccaggtcgttgaagtggaagttggccatcatgtcacgcacggccaacatcagcctgttcaagccttgattgcggttcggacccccggccactccttcctccagcctctccccctctgtggtgtaatttggcaataatgaccggaagaagagggcgattgtgtttccgtggctgactggactcagcctctccggtctgacgtaggagtagatggtgtccacgggaggcanagggtcaaaccccataacagactgtgtggtcacatcc

SEQ ID NO: 207 - DNA, 369 bp, Rattus norvegicus
  Genbank Accession No. AA899709
tttttttttttttttttgtaaggagacactttaatcagaaagcagacatcagcagacagaacccttgagcacgctcagagcgtgcctcacccccaggaatacccctcaggaaggaggttcactctctatcttcagggtaggtgtctgaagggttaaacaaatcacagctccagcccacactggacacagaatcatggcagatcgcctagaagacaggcaggtccgtaggtcacacatgactcctaacaactccattccccaatccccccgactacccttcatgtccaacagagaatgtgctcatctctctttctgctcgggacgccacaccttccagatgaccttgcctgccctctctgccccaagcgt

SEQ ID NO: 208 - DNA, 470 bp, Rattus norvegicus
  Genbank Accession No. AA899721
tttttttttttttttgtctataatgatccaatttttattttttgtcttaataagaatgtttatacttaaggttcccctttaattcatgatacaaaagaactctatttttggataggcactatttttaaattacatgttatttgtgtgtgcatgtgcaggtgtgtgcgtgtgttggaggacaacttgtcagagttggttctctcctaccatgtagatcctgggggaaagacaatctcaagctgtcaggctgggcagaaagcaccactatcactgagccatctcaccaggtcaataggcacagttttataaggaagttttaatttctttgttgtcttatagcactggagaatgaattcagggcactatagaagaaagtcaaatgcattgccactaagctatatcctcagtctctcacaggcacttaattcattatattaagaaaaaaaagggggggttggggatttagctca

SEQ ID NO: 209 - DNA, 528 bp, Rattus norvegicus
  Genbank Accession No. AA899854
tttttttttttttttttgactttcgatgtttagaacatttattaaagtacaaaatagttggaattaagctgaatagacagacatattaaatatttacaaaagacactgataatagcacttaagtaacatatacaacagcacagaaggtctcggcattcacaagtcggaattacggagattggcacggatcacacttcctggctgagtgtggagatgtcaacagtcctgcctccccccagggatctcgagttcggaaggcacccccaaacaagagtcaagacttcacgtaactggcctaactttcttcatcctgctgcttgtgctgagtcatgaagacatggtcaaggtgacttcctccagcctctgatgatgttcaaaaggtacgagcaatttctcatggccaaacaaaagtccatcacatcagaggctgggcactgtatctgtactagaactaaccagctctttatgactgaattctacctataaaattgaaaacaagggctgtcttacctcatatttagtgggata

SEQ ID NO: 210 - DNA, 511 bp, Rattus norvegicus
  Genbank Accession No. AA899951
tttttttatttttttttcaagagagatttgtcatgtattggagtagcttgaatggaggatctccagacacaaaagtttgcacataaacctgtcttaggtcccctttgtccaagttctcagtttttagaagtctctggggatttgtaagaaattaggagtaagatgacattttgtagaacagaatggagggaggccagtctcaatcatgcggtgacatagttagacacctcaatgagatttctgtcaggatctcggaagtagatggacagaataggcccctttgctcctgttctggagactgggccctcttcaatggggacatcaaaagccttaaggcgcttcatcacctcctccaggggcgtctctgtgatcaaacaaacgtccaaggagcctggaatggggtgggctgctttgggatcaaattcctttcccacctcgtgcaggttaaatttttggtctccgaaacacagtgctttccggtcccccttgaaagtaatgacctccatgccca

SEQ ID NO: 211 - DNA, 534 bp, Rattus norvegicus
  Genbank Accession No. AA900863
tttttttttttttttttgcctcaaaaagtgacatttattcaaagagagagagagagagaaaaaaaaaacaaaacaaaaaaacaaaaacaagatgtccatcccttggctcccttccctcccccctccagctgttcctcagccctgcccccaggactgaaccctgggctagggccaggtagcaggacagcccctcaaatgaggtcagcaacgttgaggggcatctcttcaatggaggtgttgtagaaagtctcaatgtctcgaagagtcctcttgtcttcttctgtcaccatgttaatagccacacctttccggccaaaccgaccacctcgaccaattctgtggatgtagttttccctgttggtgggaaggtcataattgatgactagggagacctgctgcacatcaatgcctctggccaacaggtcagtggtaattaatactctgctatagccagaccggaactccctcatgatcacgtctcgttccttttggtccatatctccatgcatggcagaaactgttaaatcccgggca

SEQ ID NO: 212 - DNA, 580 bp, Rattus norvegicus
  Genbank Accession No. AA901338
ttttttttttttttgttactttgtttttagctaaatttaacgagcagtttattgtagaaaagaaaaccgaaggacagatcaaattgaaagaattactgttataataactttaatttatcttgcattttacagaagtctatgaacgattttaagaagcacctccttactccatcacgtttctctgacagttgttaaagtaggcaacgagtatatcaacagcttgaataccggtatcttgcaaggatttcagaacaatcactcgccaaagaacttggcagtttctatcttgtttttaactcaatggtacatccactctgatggtaacctgtccagccaaatctccaccacattttgaaaaaatcaatggtgattagcaaattagttagctttggcacggagctgtgctcgcttgcctgtgacagcctggaagccagttttgatactggccacagagcatcgagaatgacaagtttcacactgtaagaaatagagtcgggtgtccttctgtaagattgtgtccggtgaccggcatgtgtgacaagtgacgtattccttgatatatcttctcaagacgttttct

SEQ ID NO: 213 - DNA, 226 bp, Rattus norvegicus
  Genbank Accession No. AA923857
tttttttttttttttttcaattatgaattatgataagccacgcccagcacctggaagacactgagagtcacttactgtgcacggtgacttgcacgtgggctgtttcaatgttggcattactgtctaatgttacaagtgtgtacaatcccgagtctttctcagtgaggtcctgcaggagcagagatccgttggtgtaacctgtcgctcttcctctgtcctcgtgccg

SEQ ID NO: 214 - DNA, 556 bp, Rattus norvegicus
  Genbank Accession No. AA924005
tttttttttttttttgtcacagaacactgtttgcagtagaggaaaccggcatcacaggctggtagttgtcatggtttcttcacaataaccaggacgtggtcatccttcagcgcaaaagccctcacggcacgtaccctattgaaattcaggacggctccaatattctctgtttttctttcaccattttttttaaaaataaacatttttttaggtttgtccacaagaaggccacgtaggctcttggctagcggaagacagaagagctgcacacctgggctgccgcccgcgctgggctggcagtttcgtcttttttttttttcaactcatttttattaaaaaaataaaaaatgctccaactatcagttttacaaaatctctaagggaaacacaagagcaaggtgctgaggtaaaaaacacctgaggtagctttatttgtgtgtgtttttttttttttctcatttaaaaaaaaaaatctgtaaatttaacgccctgggccaacgacctcgtataaattgctattctcctgcgctttaaatttttaaagaaagaaataatt

SEQ ID NO: 215 - DNA, 458 bp, Rattus norvegicus
  Genbank Accession No. AA924210
tttttttttttttttttagaatacaaaataaggagctctttattattatttatacaaaactggtacattaaaaaaaaattaagattcaacaactctgctgaccccctgaggaagctaagagcttttatgggtccaccaaaggagcccataaatgattcagtcacccaactcctggccacaggaacaaggcacacagctccagggccattcatgtggctccatcactggctctgtaggctgacttcccttcattaggctcggcaagcaagccaggctttcccggaccaatgctcctgagcgaggtcttctctggcccaagctagagcattttatccgtgtaaaagctgagtacttttatttcttaaacacttccaataaactcctagcattagacactttattacaacatatacagatttgatagtttaccaagaaatctagaattcagctaaatcctc

SEQ ID NO: 216 - DNA, 441 bp, Rattus norvegicus
  Genbank Accession No. AA924301
tttttttttttttatttaaataaaatagttttatttatattaaatgacttttaaaatgataaaacacttaatagatactaaataaatagaactggctgtaaatctaagttctctgatgataaccatacaaggatccgcctgggctgattagtttgggagatgatctggaggttggtaggactctccttcatcctcaatgtaaactgtgcctctggtttccaaagttccccttgtttctccaaacgttgtatgtctagaaacatgttttaagaaacaaactggagaattgtatgggtttagagtgcagttgagaagagaatgagggttgttttgtttaaagtacagaacaagaaacttccactgcttaactgattatccagaagtgaaaaagaaactgagctaaaggttgtgctggtggcggagaaagggagcaacaaagat

SEQ ID NO: 217 - DNA, 565 bp, Rattus norvegicus
  Genbank Accession No. AA924342
tttttttttttttttctgttattatatgtttatttaactgatgaagcgagagacaaatcagggggctaaggtttgatgggaatagaatttaaaacaaattcatatacaaaaaattttcagcataattccaaagtgtactttcttcagtccagaagttaaattccataaaactacattccatacagtaagtaaatgtcgttgcactgatggcatagtgcgccatttgtgatcttgatcatgcattgttcatactgtgcaaaaataagacaattccatgaagcagaaagagtatacttttagagtcgatgaatagaggaggtgcgttaagattactgtatcacaagtgtggttttgtagactcggtgatactgaactgccgattcggcttagtagcttcctgcattagctcctgcaactgtccgatttgctcatcacgaaagtcattgagtttttcttctgggagagaagtgccaaagcatgcttttccgcttgaactttgtctgctgtccttagcttgttgccacaacactgctgcatatgtctcccattcctttaagaaacgctg

SEQ ID NO: 218 - DNA, 355 bp, Rattus norvegicus
  Genbank Accession No. AA924405
tttttttttttttttctggttttgcgtttttattggggtttatcatgggcaggaggaactgccaccataaagtatgcccctcccaccaagcaggtccattctaatcctcctcccgggccttctgcgactttttctttttctttgtgctgctctttgtgcagcttgcagcagcctcaggctcctcagaaaatttccttttcttcttaggggtgatggggcttgctgcctcttcaggttcactggccacttcctctttaggtaaggacttctttttcttaggaacacttatgctgctagtagccatctcttcaagatcactggccaactcctccttgggaaaagctttctttttcct

SEQ ID NO: 219 - DNA, 384 bp, Rattus norvegicus
  Genbank Accession No. AA924460
tttttttttttttttttcaaagaatgtaattaggtatttatttagtataaaaggcctgtgcacagtgtaacaaatacaatttttacagctgttttacaatcgtggcgtctgttcatttgtgtttcatgctctgaattacttcatccagtagtttgctcacttctttgtgtctcgttactgctcgactcatgcagtcctgaagtttagctccagtcagcccactcccacctggcttgtgaagacagcacagcttgccttcctcgtccattactacggttaaggttcctgtggacaggtgctcctcctccccggtaggatcgactatcagcaaagtgtcatcaaacacagcaaatgaagtagcaactgggtttgctctaacattca

SEQ ID NO: 220 - DNA, 538 bp, Rattus norvegicus
  Genbank Accession No. AA924560
tttttttttttttttttacaagtttgagatagttttatttacactcaagttgcaaagagtctcatgacatctgtccatacaaaataccgtaacaatggttacaggcaccggtaagagctactctaactatgagccctgtctttttttaatgcagtcttttcttttgattacaaataggatatatgacattaaggtacaagacacttcaaagtcatttcaccgacttcccaaacttgactcatagaatgcagagcacattaaaagatttttcttaaaaaaaaaaaaaatggaaccagccaccttagaaatactctgcaaatatgcttacaagtttagaaaataatgcttttttaatatttcaagagataacatgataaaaatgttgcctgctgtctgactttctgggattcagcccctctaggagctggtgtgccttggtggagtcgcctgagactgtctcgaacgtcacacagacgtatgtgaggcgagagttctccgtcgctgggtgactgaaggctttgcttttatcatgcatttg

SEQ ID NO: 221 - DNA, 527 bp, Rattus norvegicus
  Genbank Accession No. AA924630
tttttttttttttttttcaccgtgtcagaaactgtttaatgttagaattacaggcttttggcaagtatatggcaagcccatctgtccgttcccatgtccactgagaacacagcagagggggcatgccccaagctctggcctcagtccagacttcagcttgggtttgtccagcgagatgtctccagtccatgaaagcccatctggctacagcttgagttcactgggcattggctcccctcttaggccagccagcaagttgttagccgccagcaaggacatggtgttgcgagttttgtaggtggcactgccgatgtggggcaggatcacgcagttcttgagggtcagcagggggtggcttggaggcagtggttctggggtggtcacatccagtcctgctgctgcaatctgaccactggctaatgcctggtacaggtcttcctggtttaccacatctcctctgctgatgttgatgaagacagcagtgttcttcatcttctggaagaagtccttgttgcagagccccctgg

SEQ ID NO: 222 - DNA, 520 bp, Rattus norvegicus
  Genbank Accession No. AA924794
tttttttttttttttttcgtgggagtgttgttttaatacagtctgtgccaagcaacatcataatctccaagtttctcctatctttaataggcaatattcagaatttaaaaaaaaaacaataacaacactgcagtcataaaacaggccagcgacacttttgaggagacttaaaaatgagaagccatgaattatcttctttgaaaagcagccatttcaaaaggttttctttaatatcataaaatattctcatggacaagtgagcgagcaaacacacatgcaccagtgtgcctctgacaagagtacccacctaccccacccccaagtggacatgaaattagagaaatgaacacagcagatggaacaggtagaaggaaaaaaattcagtaaaaagaatggaatataactttgtgcttggttattttcctatgtcacaacaaaaacatttcggtgcaaataattaatttttcctcttttccatttaagactggtggagaaaaaaatacttttctataataaaata

SEQ ID NO: 223 - DNA, 455 bp, Rattus norvegicus
  Genbank Accession No. AA925026
tttttttttttttctttataaaaattagtttatttttaattgtgcgagtgtttgcgaatcatgtgtgtatgacctcagaggacctcctgccgctgtaagcgctggtgctctggaagtctcttaattgctaggccacctttccggttccatgtcaaaggaattcttttctcccagaacaatggtgcgttatgagtgaagaacagaagccaagtgtggtgatgcgtgtctttaaaagatacatttgggaggctgaggccagcatgggccatacagtgaggcttccctctaggctagagcatagaccatccatgcctgtttaatggagattctaccctagcagctagctgtgtgaccttaggaagctcgcatgccctctctgagtatctctacttccccactgcagcactgttgtgtgaccaaaaaaagagttggtccaagtagagctgacacgtgac

SEQ ID NO: 224 - DNA, 118 bp, Rattus norvegicus
  Genbank Accession No. AA925049
tttttttttttttttatcagtcttataaacaaaactttattaaatggtacagaagatcctgtgggagataggaccaccaaccgtgcctgtccagaacaaaagttggctgacccacacc

SEQ ID NO: 225 - DNA, 502 bp, Rattus norvegicus
  Genbank Accession No. AA925087
tttttttttttttttttgcatctgattactttggtttatacaagagattcttacattgtttaaaattaatgacagagcacaaaagcacaaaagcaagtctcaaggtgcaaagaacgctctgggatcacaagaagcgaagccaaaaggttgacatttcaataattggtggattgtactttaaacacattagtaccccaagtcagttatacaatgacatatactatcacttgtagacaaagattaaagggaaaatcagtacattcacagtttcaacagaaatatatgattacatacatgattacatatatttaatttcactttacatagacacaattatattgaaattagatatggttagagcataagtcattaaataatgattttacttgtattacataataaattttacaacaagaggattatgtatttcaatatggcatatataggttttggatcacaaaaagcaaaaatatggtaaaataatagagttaggagtgtcaca

SEQ ID NO: 226 - DNA, 505 bp, Rattus norvegicus
  Genbank Accession No. AA925145
tttttttttttttttttgacaagcaacacactattttttttaaatcaatgttccaaagaaatcaaaatttagaaaaggaaaattattcgcaatttcactaatggttactcactaatttgttacattgtagcaaaaaacaaaagtagggcgcagcatacaaaccaaacatgaatgtggaaagtgctagaacaagatgaacttgatctctgacttctagaaaggtcttccaaggttcatgcattttacttgaatcagcaagtgtttccctgagcgttggtgattatgtttgtcgtaatgctaactagagaggaaggtaagaagcacgttctatggtccttggccatcagtagtttatgatctagctatgcctggttataaagatgcacttactaattctaagaccttaaagcgataatcgcctttgaaagccaagcatcatgactgttcaataatcctgccgtcactcgcaacagctttggcgtctcctctactgagactgtaactc

SEQ ID NO: 227 - DNA, 495 bp, Rattus norvegicus
  Genbank Accession No. AA925150
tttttttttttttttttaagatgtgtaagcacattcagacctttatttttatttttttatttatttttattatttttaccattttgacagtttctttttctcaaaggtgatttgaacatgttcacctgtacactttggattcattttttaaccactgtttctctgtggttttttttccacacttgttttcctctcttaagtcaatcttttctctacagcagacaattatacaccttattcctattaaagaagttttttggtgttctgatgagcatttctagtgaaaactagtttttctagaggtgagaacactgaaacacaatacttttgttgcaaatgcaagggataaatttagagttacctggtatcacaatttcaaacaaaaccaaatgatgccattgttctgtgtcaaagcaaaagaagaactttaataagcttttacaccactgcaaatacaggaacagtaacccatgacatgcaacaaaagtaattttg

SEQ ID NO: 228 - DNA, 483 bp, Rattus norvegicus
  Genbank Accession No. AA925267
tttttttttttttttatagctaaacaattttattggctttctgtgaaataaaaaacaggaaccgtcatggttaaaggcgaatcagtgtcaaccaaatgaaccagccacttggttcgagcagccgtggagaacacgagaggacattattgcttacgccccatgttcgtgcatgtgtctgttgtgttttggcaagaatacaatcggatggagctttggttaaggtcgactaggactactcattgaaaatccctgcatggcacctcctcaccagctcctccactccaacccggggaatcttcacactccattaaaaaaaggtcgtagaatttggaagaagaggtagcgaggtaaatgcggtgcgcaaagatgtgctcctggtcgtggaggataaagaggacgtcggcgcataggggattgtccagtaaacaggctgcgtcgctcgtcccggtggacggacactcggggactttgatgaccggggga

SEQ ID NO: 229 - DNA, 423 bp, Rattus norvegicus
  Genbank Accession No. AA925335
tttttttttttttttatggccactaattgatattttttatttttataattaaaaataatacagtgataaaaatatctcctgccttcaagaatatgaatttaggtaggagagatggctcaagcatgtaaagaggcttgttggcaaagctgaccaccagagttgtcaggacacacgtccatgttggaagtgaagagctgcttcccacagttgtcctctgacctctacacatgcacaaacatacaaaataagggaataagtaaatgaatttttaaaaaaatttaaatatgaacttagattcaattccaagtgaacatttgattttcagtcataaagctagtgataaaattgttggacagtagcatgtataccctttaacccagggagtccttagacagcacagtaacttagacttcctagtactca

SEQ ID NO: 230 - DNA, 423 bp, Rattus norvegicus
  Genbank Accession No. AA925352
tttttttttttttttttaaatttcaaaatgatttattggattttaaaacaagatacaagaaattctgcctgcaagaaacgcacatccatcacatagtcatacaaaaactaaagatgaaatatcagaaaattatattctagaaaattaaatcagaaaccaagcaggagacttaaagacaaaatgttcagaaaatataaaaaacaaggtcactatatatcagcaaaaggaattgtactaggcagcttttcatcactgaaacaagtaactgaaagaaacaattttaaagaaggaaaggttgattttggctcacagtgtgagaactttcagcaaaggctagctttctccacagctctcacattggagtaaagcatgacagtggaggcaggtggcagaagcttattatttaatgacagagaagaagca

SEQ ID NO: 231 - DNA, 424 bp, Rattus norvegicus
  Genbank Accession No. AA925418
tttttttttttttttttccagatgttcaagtttattatacagtcacaagttacacattggaaaccaagcagagcatggaacctgcttttactaactcaaaacaagctagccaatgacaggtttcagaagagactcgttttatgtctcacccaatgtgggcgatcacaagagaagccaaaaaaaaaaaaatatcttccatgttacttagagagcaaagtaatttgatacacacagcttccaagttatcttaatatactgaagatggcttaaaactggtagggaatagtttgtcttccacctaaaataaaatgcagattggatggtttagaggtaaaacaaacaacaaaaaaccaaaacgaatcaaaaaaagcaaaaaacaaaaaaacttcacctgtatatctacaactacagcagaattgttctt

SEQ ID NO: 232 - DNA, 621 bp, Rattus norvegicus
  Genbank Accession No. AA925554
  misc_feature (1)..(621): n = a or c or g or t
tttttttttttttttttcaagtttcagaaagggtttatttgacttacaattactggttaaagtccttcatttcaaggaagtcagggcaggaacttgaagcaactagttatactcatgaataaatgcatgcatggagagtgctcagcttgttcttatacattccagattcctttgtgtagagaatggtggtgcccacagtgggcggtcttcccttcacaattaacataatcaagccaatccctctaagacatgcccagggaccaagctaactgacacaatcctgcactgagaccctcttcctaggtgatgctagattgtgtcaagttgacaaagctagccagcacatactccatcaaatatacgtagaaatatgcaaatacctctcccctaaacaaggcactggcttgatacttaccatatccaaactttgcttcaaattattaaggacctgccctacttctctattttccatttacattttaacattccttaaagtctagtttagtatatggcacagagaatatacaanacaatacttgaaaaccacaactgcttcagctagacaggggaagaaaattgtatttgatatttcagaccaatagataggactaaactcaaata

SEQ ID NO: 233 - DNA, 408 bp, Rattus norvegicus
  Genbank Accession No. AA925662
tttttatttttttttttgttcaaaaatagaaatttattaaggtgtgtttgtttttaattcccaaagcttcttaaaaccgtcttttcattgagcccatgaggtacttgaacgtagacattatacagtatgtagcagtgattgtcgtgtgtatgtgtgtgtgtatgtttcactgtgtatctcaggctgacctggaactctctctggcctcaaagttacaatcgcctgcctccacctcccagatactggagattacaggtctatgccccattcctgtctcttttctctgtaaagtgaaaaggctcaaatatctgaagtccacttaacccctgacacgacctagctttggtttgactattattgcacccccagtcagtacccagcccccagcacacccctgttgagtcagta

SEQ ID NO: 234 - DNA, 318 bp, Rattus norvegicus
  Genbank Accession No. AA925747
tttttttttttttttgtctttgcacgtttttatttaattaccattctctgaaggtgtagccagtaatggctttgcaagccatagggcagggaagagggtggttttcctggacatacagtggtgaacgagcctcggtggcctcccatggcagcggggtgaggagacagggagggaccgtaaagtgacacatgttcagcagcgtgagaccataaatacatcctttacaccagatcatatgtacacacgtgaacatatatacacaagtataaaaatacctgccctactcggcacagagtttccaaagaacagaatcgattt

SEQ ID NO: 235 - DNA, 504 bp, Rattus norvegicus
  Genbank Accession No. AA925755
tttttttttttttttttcagcttaaaataaatttattgtacaatacaaaatgtaggcatactggaaaataaaggtacatcattaaatatacaaagcaaatgaagaaagctcaacaacacaaatgttttaatccaaacactaagataaaatgcacaacatttatgctaaaaacaaaatatttcaagaatatgcatttcaaatgaaatgttaatgatggcaaaaaaaaaacagaaaaaaaagaaaaaggaaaaatatgctgtcatgtaaatgcttgaatatcaagaatcaaaaatggtaggaaaaattaaacccaacaatactgggtacttctcaaagaactttatttgaaaagagagtatttatttgagaatactgaagggaactgagataaatccacaaagtggcaaagcttttctttcctcttcttgtctgcagatgccttcccagtacctcacctcctcttacactcacaccttcctatacacatttttgaatgcttgttct

SEQ ID NO: 236 - DNA, 425 bp, Rattus norvegicus
  Genbank Accession No. AA926098
tttttttttttttttttcatttggcaataaatatttaattaaaatgtacgtgggtgacagattcaaatatggttaagcagtgagaaagaaaaattcaaatttgtacggacccttcaccacccaatcttatcttgccccagcatttagagtgattaagcccagctcttcttaaaccactgtctttagtttcaagccaacgtcggttgttgggattcttctacaatgtcatcggcgggtacccgtacctggggcgaccttgtctgcgctgggtgcagatgctgctgcggcagcgttcctagcccgaatgtgggaggccaaggcacttaacatttcctgagtggtgaggtgggctcctcgcataatcagccgatacccatctccgaataacacgtccacgcagggctcagagccgtcatgcctcacgt

SEQ ID NO: 237 - DNA, 314 bp, Rattus norvegicus
  Genbank Accession No. AA926129
tttttttttttttttttgatataataagtatatttgagaagccagagctctggggatgacacgtatctcacacaggagacagaggagtcaaccccgagcccaattaggggaagggatttatagggaaaactacatggcctcagttcaactctaggccaccctgcttctggggcaagctgaccctagttcttgttttcctcagaactgttgtgtcaggccttatcgaggccagatggtttgtggtggctatagccaggctacctcaccaaaacatgtgatgctattcttttgggaggtgcacttgtcctcacagc

SEQ ID NO: 238 - DNA, 341 bp, Rattus norvegicus
  Genbank Accession No. AA926137
  misc_feature (1)..(341): n = a or c or g or t
tttttttttttttttttccagaaaatacttgagtgtaataaggatttctgcctgacattagactctcccgacatgcaagtgttgggagctcaaaggattcttgagctgggaaatcctcaagggagatgacgtagagggagccaggcgtccaaggcgtacgaacaaggtttaatgctgcacccgtcaaggcaggagctccccagatcgatgcagacttcttcctccgtgtcctccacaggactaagctgtttctgaggcctcagcgcatgctaccatcgaggcctgtggtggggganggggctgcctaatcgtccttcttaaacttgccattgatgtacggc

SEQ ID NO: 239 - DNA, 362 bp, Rattus norvegicus
  Genbank Accession No. AA926196
tttttttttttttttttaaaaaaataactgtttcctgggacctctcccctatcttcccagtgtggtcagcctgagaaccctgctctgatgtttcacccagagaagccaaggcagggtcctgggtagggtagttaggaaagaagggtaaggaaagggaggaggtgagtctctgaaattccccctaccctcacttctaacacagatgggagcactctccgactcctaacacagatgggagcactctccgactcctaacacagatgggagcactctccgactcctaacacagatgggagcactctccgactcctaacacagatgggagcactctccaacttctaacacagatgggagcactctcc

SEQ ID NO: 240 - DNA, 493 bp, Rattus norvegicus
  Genbank Accession No. AA926247
tttttttttttttttttgcaatctgccatgattttattgatttcagcttctaaacgtagaattctcagattaacctgacataatttgttcgggagagagggacactgccattgtgctttagtgtgaggtgggtagaaccggtggtgtgccctccgggcctgtgaggtgggtagacctggtagcatgccttccataccaaatagattcaccttctcaccaaccctcttcctcacttgtctggtcctacgccgtcgcaagagagtagaaatgtatataggaacagaaaatcatcctgattttctcttgagtttgttatgcttcctagcttgttgtggcaattctgggttctttagtataaagagaaatcaaaaaggaaaaaaaaaactcttatcttggcttaagaagtccagggatatctggtagcctacacatatgcacagaatataaacatatttatatgttctatgtacacagtggatggtgacctattcat

SEQ ID NO: 241 - DNA, 466 bp, Rattus norvegicus
  Genbank Accession No. AA926261
tttttttttttttttttgactaaatattttgaggtcatttattcctggatctgctttataaaaggaaagtaaatgcagaagaaaattagttggctttttatataaagttggctagtttaagaaaagcaggtttagtgttctttgtagccacccagtatttaaggatcaaatgtttgctgctgctgtaagaccccattttaaaagctgcaggtctagaaattagtgtttccttcaaaactggtgaggactcaagtgctcatctttatcctcgacactgacaaaagtctcttctgtgggaggtggagggtcagcaatgccagaactgtgggtgaagaaactggattccagggaagatgaactggacatcattggtgggtactggtactcatgggcacttgctggattgatctctgccaatgtctgggcatctgtatctcttgcgtttaccagcctcagaaagagctca

SEQ ID NO: 242 - DNA, 421 bp, Rattus norvegicus
  Genbank Accession No. AA926262
tttttttttttttttttaccttatagcttgcatatttattgaacaaatacgactaaaatagctaaaatacattgggtacttatggaaggaccacatgttacaaaagcctgcgttttcagcagcgtacaactgcaactctacgtaaatgccacaaatgcacaataccgtttccttgctctatttacatagctgatatatctaccctaacagaggtgggtcaattacagttttgtgattgctcccgctaccgtgactgcacatccacccagggccagtcacgagaggacagcctctcacactcttggtagcatccgctcagcctacaacactgaagaagaaagccacactcaagacacaaggaaaacaagtcagtccagtctagagaagaacattccgggaaacagagtaccaacaccttctt

SEQ ID NO: 243 - DNA, 571 bp, Rattus norvegicus
  Genbank Accession No. AA926305
tttttttttttttttttgaattttaaaaaggaaatgtttattgttgtgttacaaggtgattataaactcctctaaaaaaagcaaagatggatttaaaatatcaatatacatattcatctaaaaagcaaaagagaaaaaaaaaaaccgaaaccctgcaaaatgcggggtcgccgtaattaaacatacacagagcttgtatactgcaagacaggtcacacaccaaggatccttcaaacacaaacgctcctcaccttcttggttggtttcaggtttttgtgtgtgtgtgtgtgcgtgtgcatttgtttttttgttttttgttttttacaaaagtttaaaatattttaaaaatattttgaagtttttaaaaaatgtcctgatgagccagacatatttctgaaggaggcaaaacccacgttctcagcttttctcttgtgctaaatacagtcacagttgttagggattggcaaaattggtttaaaagaaatgtaactaccatctcattttgaagccaaatatctaacaagatgccctgtccttcggggaacatgccagaacatgcctgcaatgacac

SEQ ID NO: 244 - DNA, 588 bp, Rattus norvegicus
  Genbank Accession No. AA942716
aatgaaacaaatccaaaagatgtacagtcaggctcacgttgtgcagttcacaagcatggaagaaacaaacagacagaaggacagagttccaacagaagaagctaacccaagaccaggctggacttgccgccaggggggtttctcctggatggcgctggggccggagccactgggctgggcacaggagcagcgggcaccggcttctcttccacctgtgccaggctggcttggaagtctgtgtccacattttcatgcacatcactttctcccttgaggtctaagaaatctccagagcttgcttcagaagagttacttctctgtgttccaggcgactccgaatcctccctgccacctgctgacttggcccaagatggggggttttcttcaggtgtcccaaagatgttagaagccatcttgttcttcctcacgggctgttctgttggctcatcaaaacctaatgaaaaattggacccaccacctggaggccgcaaaacccgggagctgttcctgctgttagggtctacacccttgaaggtggtggcagtggtcatggcgcaaaggggcgaggtagactggccctgaaaacgc

SEQ ID NO: 245 - DNA, 550 bp, Rattus norvegicus
  Genbank Accession No. AA942770
acaatgttccctcataatgcaagacattttggacttcacatttttaagccagaggccactcctgtctgtttctttagagtggtcactttagaaagcattgataggcggttgttgaacgttgccacggaaacacattcaagatgttggtggtcttctttgctgcctgctttgggttaaaatcaacatgaagcacacaaacagaagcatacgtacatttgcagcaaaggccgctgcaaatacaaccccaaagagaggtggggctcagcgatccatctcacagcaatgcagggagcctttgtgcctcctgcacaaaattagcacattcaggggagacgtgtgcctcacaaagggccatgtggaaagagttattcactctcatccaaaaatgaagacagtctgagggacaaaattgttcatggactctgctcccaacgctccccccattccccaaacaagccaatgctcaagacacctaccaaagccatgggcaaacttgaccatgagcaaacaatatgaatgagaacagaatgacgtaatgccgttgtgcctg

SEQ ID NO: 246 - DNA, 522 bp, Rattus norvegicus
  Genbank Accession No. AA942774
attctccacagagttcctttctacagctctacagtataaatacacagaggtgaccttctctcaccaggacaaaggggtacacctcacctgcttggtccccactgccaaaccctcactgttctgtgtggggcccatcagcagagagtcactcatgcggctcaagtgtgcgcgccaagtccatgcttgggtagaaacagctccgctgctactgatgcaagttcctgaagatctgccccaagggcggtccatggctacagaagggtcgcaggcagaagcccctcatcgttttcatcccaccctgtgctgcatgctcccaggaaccatgaaataaataaataaatactctgaaaaagctctgggggaggggcctgagccagctcatggcttaagaagaggtgcagcgcccccttggcagagaagagggaacataaaactggccatgtgccctatcctacgatgtaaactcctctctaggaacagccctgaaatccaggcgatccatacttcccccaacctcaaagg

SEQ ID NO: 247 - DNA, 461 bp, Rattus norvegicus
  Genbank Accession No. AA942995
  misc_feature (1)..(461): n = a or c or g or t
gagcaaatgttttaatcaacgttgagggaaaacactttggaaagcatacagaaaaggtagttaacgttgaatcgcttggaaacggaacctcagggaggctaacccaatgcacccttggncaacttttgcttcctaaattccttgtctgacgtctggtcccagtgcacgtgggaatgacagctgccacgaggggagtgccggcctgctgctgctcagagcgtgcgtggggtgtactcaggcagcctctgcagcctctccttctcagcctcgctctcatctcgtgctatcaccaatgaatgtgaatagcccatggccacctgttcggagaagatccatccagagtcttcacctcctgagctgcagtagaagacttgggcttgtggtccccatatcccaattccccgaaggttggtgatgggccccagctgatggtactctcgtccgncgctacgatgatgctg

SEQ ID NO: 248 - DNA, 596 bp, Rattus norvegicus
  Genbank Accession No. AA943028
gactgttaatgaggacgagtcagtttggagaggagcacgcagtatttgcttggcgttgtcagccttgcaccaaggtcccatgcctgtcagcctagaatgcagggcactaagtaaagcatccctggctctcagctgccactgggctcctagtgtacaagatccaggatgagacgggactgtagataaagagaaggtcaagagtggcgaccagtctgtgagcttgggaagggccgcctgccccaagaagcctgcagtctgagcctctgtcagggaggcaagcttctgctcacctacaacctgagacctgtctttttgagacacaaatcagtctttccattgaaacgagagttggggacagttttttcaagtgggaacaggatgaagaaagtgaagtatgggttcaccagttggtgtagtaaatagaggctagcactgtgagaaccccactggcagtgatggcccaggctatgggaacccctcatgttcagaagcgtcagagctgggccgagctgaggacgaagttcatatgctctccccatgtcgcccatccatggagctcactggagctctcctcttcaggctcactgctgcctcgt

SEQ ID NO: 249 - DNA, 401 bp, Rattus norvegicus
  Genbank Accession No. AA943202
aaaggactttattgtcctgcttctacaccataataaaaagggacctgcaagctccaggcctgtaccatttgttatcactgtgaaacatgactcacttgaacatatttcccaccccgcccccagacttcacaagataaatatgttacaattttttgaaaacagaataaattaataacttaaatgattaggcaccaacaatgacttgaaaaattaaatgtcaatcttaaatggtaacaagacacgatgtaagactaggctgcttctatttcatttttcttcccaacaaatagtaacaatcctgaatgaaatgattctaaatttcaagacacaaataaccaacagattacacaagaacacacaccaccagataccacaacagcacaaattattagcaggcgccc

SEQ ID NO: 250 - DNA, 541 bp, Rattus norvegicus
  Genbank Accession No. AA943524
aatgtgaaattataattaacatctccatattaagcttttggatcttgcctgtatcttacaattaaagcacactttactgcggacttagaagcacgcgagcgccggcaagatgaattcttcatgcctctgtgcctattcgttcttcaggtgaagtccgggcggatccgcaccatcgccccacatatgctccggcggtagttgcttccttcactttactgtgctgtgtttactggtccgtggtcaatgccctggcgatgaggcttggaccacattacagcgggagaggttttccaccttcccgtccgcttgctcgcagctgggtccggatgtgtattttgctccttctggttctccgcacttgctagtgggctgcgaacaaactaaggccgacttggtcttcagaggcacgcggctccggaattcatagcggtcaactcgccccggtgggctcagaggccgggatccagcggcctcagaccgtgcctgtcgacctgagcgctcccagtcccgctcgaacatacgcaacgcgaagactgcattc

SEQ ID NO: 251 - DNA, 650 bp, Rattus norvegicus
  Genbank Accession No. AA943773
gcatgaaatggcttaaaggatctgatatagaatttaaattacaaaagttaaaatacaataaaatacaatgccaactacacataaataaaaacctaattttcatataaaaatactgtaccgctgttaatacaggaagctactgtttttcctccccgtgtggaggattaaacccagagagttgcatgtgcttcgaagtgagctatagtcccaggaaagaattttgatggtattatttgttttaaaagtcccgctgtgtaaatgatattaaaatctaagtccatgcaattgcaaagtcttcagtagcttatgaactcaactgtagtgtgatgtgtacctgttctaagtacctgtgcaaacttactgagttaaggtctaagtctgaactgctttacaatcctacctgccctaacgtaacaccgcagagagaagccccacacagtaaattagaagcagtaagtgaaaaggtactatgctatacaacgtggtaactcgggtgctatctgtcttatgtacactgaaattccaccacttaaaggcctaaaaacacgtcagtgtaatgtgaagtaaatgatctgaacttatttataaagagaagtcaacaaatacccatttcgaatttgtgggtaaactgaagctgctgggtgccctca

SEQ ID NO: 252 - DNA, 554 bp, Rattus norvegicus
  Genbank Accession No. AA943791
aatacatcgatttgcagttttacagggaccagagagctcctcggtactaccgtattttatgttgcacgcacagacacgcacacaatgtcattagtagtttctcatctctacacttttctttaaaaaaaaaaaaaactctcatgtgacacagaaatctttcccattactttaacacagcagcaacagagaaaagagcaaggtgtggaggcttccagtgcagaatggggtccctggttgggagaccccaaagaccatcggtgtatttactttctgggagggcagaggatggtgatggagtgttgtctacagtggaaaccaaggattcaaaatgtacaggggcaaagaaacttaagaaaatggagtaaggcattctatctatggaaatctgtaagtcatttcccaaaaggattgggaagaggacccattcctaattttacagtcagaactttgggaccattgaacaccttgaagtccccagctcctacttccttacaatagggcagagctgagaactgaacgaatcttggatgccagttttcaagctgactgggttt

SEQ ID NO: 253 - DNA, 542 bp, Rattus norvegicus
  Genbank Accession No. AA944397
cagcctcatcatcactgacttccttgtcacgttccttctccacaaagagagtaatggggtagccaataaactgagaatgtttcttcacaatttcttttattctcctttcctccaaatactcagtttggtcttcttttagatgcaagataacctttgttccacgacccattggttcacctgtgtctgtcctcacagtgaaggatcctccagctgaggactcccaggcgtactgctcgtcatcattatgcttggtgatgacagtcactttctcagcaaccaaatacgcagagtaaaaaccaacaccaaactggccaatcatagagatatctgcaccagcctgcaaagcctccatgaaggctttggtgcctgacttggcaatagtgccaaggttattgatcaagtcagccttggtcattccaatgccagtatccacaatagtgagggttcggtcttgcttgttgggaatgagattaatgtgcagctccttccccgagtccagtttactagggtcggtcaagctctcgtatctgatcttatccaga

SEQ ID NO: 254 - DNA, 636 bp, Rattus norvegicus
  Genbank Accession No. AA944413
  misc_feature (1)..(636): n = a or c or g or t
ggaataagcttgaggccgcaatgttttttttttttttttttttttttgctgataagaattctttttatgttattcgaataaaaaatacattcatacagaaatataacaatctcgcaaaaaacaatttcaaataaaatcttgtaaaacaaaattttacaaaaatcttacaaagattctttagataacagggtgcttcaaaaaaaaaagaaataaagaaatttcactaatagaaattttttttttaaatttcaagcaaaagtttctgcttgattgaggctcagctgtcacctgaacagaatgtactcgcttattattaaaattacaggcattgacacatacggcacccagccccacccagtccaacaacatctatgtgtttcataagtgagacaagccagcacaagtcctccttctcttctgtttaccttcttacttaatggaattgttgtggataagcacacagcagggccaaaaaaaggagttttccaaaacccagcaaatcaagtgctaggattttgaattgccaaacaaaagtgcattttccccttaagcaaaacgaaaccagttccgtagagaaatgtattcgtcaggccagatacgacaaaacaacacaacaacaacaacaaganaaaaaca

SEQ ID NO: 255 - DNA, 508 bp, Rattus norvegicus
  Genbank Accession No. AA944439
ggcaatttcagtctgacgtgaagggcagagttttctgcttccttctccagtgtctccagccatcttcttatccccttggctcggctcctggctcctggtcccacggaaggaaccaagggctgcagtgcccacagcccagctcaggtgggagcctcagcttgcagcagcagagccttgcgccctctgtggtgacttgtccagccaccctggggtggcacgtccgggaacctcgctcagtccctggggcggcacgtccgggaacctcgctcagtgagctgaagaatccaagagctgactcctcacgtatctggcaggcgaaggagggttccagaactggtggggacacagtccaccagcttccagcatcacggacagtgaggactccagcattcaccaggtgcgtgatctccgagtccctgaagccgtaagtctgtgtcatctggtcctgctggaaactaaggtccccacaggctgggagcaccgatgccaggaacttctgcaccgcccc

SEQ ID NO: 256 - DNA, 570 bp, Rattus norvegicus
  Genbank Accession No. AA944481
aagggatataagcttgcggccgcaatgttttttttttttttttttttttgttctgaggttgtttttattgtaagaatgttgtgagctgtgccttggaaccacagttggcacctgttcatccacagcacccacaagagcaccattgagtgtatccagggctcctgggaaccctatctccagtcggtcaatatgaccgagtccgccattaagggcccagctagttggactgaaatggtccctctgcatctccaacttctctggtaggcgagaagtgagagtcaatgccccttgagcccacgttttctgggtctgggccatttgtttcctgttgctctgactgtttcagacaacagtgcttgcagaccccaacacggaaaaggggtcctccagtcactccagttatgggcttcttctctgtccacgagactccagatagccctacttagagctcctgctctcagcagaaaacagccatatcttaaggtcacaaccaaagtcactgtcttcttaggcctggaaccaggctccagtgaggaggctaggaagctgctgtaacctccatgggctgga

SEQ ID NO: 257 - DNA, 400 bp, Rattus norvegicus
  Genbank Accession No. AA944803
ggcaggacatggtactcttttattgtgacgctcagtggaaacatctgtaaaccagcttactgtagtggtgacagctgcaacacatgctaaggcacttgtattatataaaaaaggggtgcgggtcccactcactcctgtgacagcaactgggacctgaattcagagcttttctagcatatgtagcttcatgatttgactgtttctcctttaaaaaaaaaaaaaaaaagccttcttgccatagggactctaatcacagcatttataacacagtgaggaggagcacagggaaactcagcgaccagtgtagaccattgtagggcaggctactctcttctaagcgtggctccaggggcaaggctgtgaggatccacaactagagcgcttactacaagaagggaaa

SEQ ID NO: 258 - DNA, 402 bp, Rattus norvegicus
  Genbank Accession No. AA944811
ggacgggttactttatttcatagaaaatcacactgaggaattgaaaagtcaagtatactcagcttggattcaccgccacggactccacactggagggtgagactgccagagcctacatgcccagacacatgtgcaaaggaacgcagagacaatctgaagccacgatgtccctctgcagggactcaggccccagagtttgctcactgcatgacagggctcaggtcccccgggttcacctcagtagcatatgagcccagacaagggcagggcacaagcgactgacaccgaaagaacagtcatggtgtcacggggacagaaaggcagctggtctcagaagggaaacactggtgtctgcatgggagaacactctcggaagtcccagcttctgtcagactgctttca

SEQ ID NO: 259 - DNA, 453 bp, Rattus norvegicus
  Genbank Accession No. AA944958
acagctagaatctatttatatgtcccaggtggggaggacagaggcagacaacagagggaaggccattcaaggtctcagcaagtcagcatcctgagtatctgagtgggctgatgcaagacgtccagatggccaggacagcagcttcaagtagaccctgcgtccatttaccagaggatgttgttcctggttctgacccattcttctcttttgcttcatctccagggcacaagagctgacaggttcagaaagcttctctagtccttcttgtccagatcagttagccggatagcgggtgttgtagactgtgtagacgctgtcccactggtcagctctgctgccacagcccagaagaggcttattcacgaggcagggtctctcagccaaaacccagagctaactgatatggatagtctcctgccgtggtgctctggaggtccttgtcttcatcttctg

SEQ ID NO: 260 - DNA, 664 bp, Rattus norvegicus
  Genbank Accession No. AA945076
aaaagctacttaattttaatactccacaagaaaattttaaaaagacttgacgctcttgacgttgggcatggtggcatatgtctttaattccagcagttggaagaaacagaggcaggcagaactctatgaattcaaggccagcttggtatacatagtgagttgcaggacaggcaggactacatagcaagaccctgcttcaaaaaaacaagaataccagtgaagaagcattaatgcactatttgttttatggatcaattggagaacaaaatgtggagatgttggcatcaccatgaaagagcaatagtgttagcagtcgtgttcagacctccttgactaactcaggtagacagaggtgaggcgaaagatgaagcctacagatatgttggtctcagctagagagactctactgataatggccttgggcctcgacaatggattttctgaaaatgctgaggtagaaactgtttagtctgttctatctgaatggttaaaggtgtttatcattccagaaaccacttctgctgctaattatctcctcggtgcatgtgaacaagtgttaaaaggtgacttgtgtctgctgaaacatctctgtttactgaactttcatctggaaatgagaaatgcgaataagaaataagaggtaaatttaatttaagtaaattta

SEQ ID NO: 261 - DNA, 640 bp, Rattus norvegicus
  Genbank Accession No. AA945569
aaagggcaataagcttgcggacgccacacttttttttttttttttttttttttttgtaaatgtcgtaactttattcaacatataaattttatgggtttttaattcctttccatttatcttgctgtcttggttcttcacgtgtggaggagtctttctgaggaaatctataggttcctatttttaagcatttccttgttcagagtcagaactgaaaggggcactgtattcttcaatggcgaattcatctgtctcataataatcgtagacttttactggggctggttttaagttctttactggaatgtcttgttccaccgcgaaggagaaacccatggtttgattggttagcttttcaatgtagattagaacgtggttggtgttcacttcagtcctctgaatgttagactggtcttggagctttttcacggatggcttcacaggtatgaagcctgacaccatcttcacatcaacaatgaccatgttggagttgggtcgttctccaatgtagcttacgttgatgtggatctggaactttctgtgatgttctgccttatcaaagtttaaggggagagtgttgaccttcagagtgaagggcgcttctccttctgcctccggaaggatgttgtactttagagatgtc

SEQ ID NO: 262 - DNA, 577 bp, Rattus norvegicus
  Genbank Accession No. AA945624
catgtatacactaaatattttaataaatgaataagggtctgaaggggaggaaaggaatggaaaggaatataaagtagaaaggaatataaagaaactgcagatagaagtcatttgaagatgattaacaggaaactgagtgaaacatgttcagaaaattatgctacaaaagttgcaagaaaaattttagagaaacattaaagaacagaaaactgagtgaataaccaggcagaactaatacagtgcaacaaacttattttcaaaatatctgatggagttgaatgaaactgaagacactcattggtgggcactgttaaatacatctcaggatacatcaccaccttctctttgccgtgctttaggtctcttactatgttgcttgtcagctgtacccagagcataaaatgttatccttggaagtaccaagagggtgtgcaatggatgggttcttccttccagatgctcttcagccgctggacccatgatgccagcatcacttttctttgttcttccgatgaaacttcaggaccaaaactgatctgtggggcaaggactttaaatccacagaagtgcaatgtac

SEQ ID NO: 263 - DNA, 290 bp, Rattus norvegicus
  Genbank Accession No. AA945656
aatatgcctcaaagaaatttaatatatgcacaaaaatttcaagagtgaaactatatataatacaaaaacaaaagaacacaaaacagaaatgcatacaaggaaataatttatacacaaaggaaatcaaacaaagtagtttgttaagacaggaattcaatgctgttttataactgcctaatacaaaatattagcagctggcattgattagattgtgatcaaattagaatactgtatcagtgacagtgtaataaacacaactgttttgaccaacagtttataagaccttggaa

SEQ ID NO: 264 - DNA, 520 bp, Rattus norvegicus
  Genbank Accession No. AA945704
caggtttagcatcagtctttaatgctgtcacactgcataatgacaagtcacacactttggtcttgtgttggtagtggcaacttacaatgagtcgaatggtcagagcaccaggctagctccaaagaacagatccattccctccccaggtctgactcatcacagccctggacaggcagtagttgacagggactgctttcatccaagtgcacaccagctttgcatggaattataaaaacatatttacatacgttccacggtgctcctttcatcagaagcaaaggcccttttatcaaaagggattatatctagggctgtgcaaaattcaaaaggactgtatccttttgagaaagttgagtccattacacacacacatacacacacacaaaaaaagtcacctgcacctctgagaagtgccaggtgtggccaagggctacctctggaccagcaagtactgtgactgtaaggcagccatctgatttcaagagagccacaggtccaggggatctcctggctgtccagg

SEQ ID NO: 265 - DNA, 323 bp, Rattus norvegicus
  Genbank Accession No. AA945818
aaaagaactcaaattcaaattttaattacaaaaaatatttctgggaagctattaatactacaaaagcaagggattagaggcctaactggagcaagaccctggtgtctgcagagacacatggcggggctgtgaccttaaggtctgaaatccagagtggattgggcagtggtcacccagccccataacctctgcattgctcattccagtaggaaagggagggcagggaagcagggagaactgtagcaaagtcgggttcagctgtggctcccgcacctgcctgccaattaaagaataaaggcaagaagttgaaacaggcggcaccc

SEQ ID NO: 266 - DNA, 560 bp, Rattus norvegicus
  Genbank Accession No. AA946011
agatcaaataatttattgtgatattgggagtaaatagatattttattaacaaaacaaaaatgatggataacagaagcaataagtgaaggtggtaatactgcccatgaccataacctcatggtcagaaacccagttctaaagaacagctgctggtgtcactttattgcattcaaccatggaaaggttggttgtgggattgaagtgactcaccgggaccctctcaccccaactggacacacctcttgctgcctcctttggtgtataggaagacaggtgggcttctccttgaggacactgaagtcacacagcaaagtagcttcttgccctcaatgcccacctcacctccagagcgctgagctccgcatgggagcagaacagcaaggatgagtgtcttgctttcaaaagctttgggcagacacaaagacaatctatctcatctcagaattgttttcctcaagaagtctcatgtatccttggctggcctcaaccctgccaggtaactgatggtgaccttgaatgcctgatcctccataacactttttcccaaggctttcacctgg

SEQ ID NO: 267 - DNA, 537 bp, Rattus norvegicus
  Genbank Accession No. AA946017
agacaagctggaacttttatttacactaaaagcaaagaagggatacagaggaagggtttggaagccataatggggaagccaagctcttaaactcagttgcagtggggtgtgggccctgctgccggacgcaagagaataaccagaaaaagcgataaggaacagtctgcagcaggaaccgagttttcgtgctggaagaaccaggctcacagaaccaagagtcccacacaggggatgtgaccagagcatgctccaggggctgaagtccacctcaaacctgggaaagtcccagggcagcccctgagagcttttgactttggacattttgcattaattcttagccagactttgagagacaccaggccagacgaactttgctttgttgcctttatgatttgggacgaagagacttggacggaaggaagcatcattgactgtccatcccttccctgggtgcaacacctctccctgactgacagaatgttattgggctccttggggctccgctgtgggctccctggggttcactggcattgggtg

SEQ ID NO: 268 - DNA, 454 bp, Rattus norvegicus
  Genbank Accession No. AA946040
aacctttccagtgagtttttattagtagttgcatcatgattcagggtcccagggtagggaccatcatatactgaggtcccccttttctatcggggagaaggtcaaagagcagaggagaggtgggcggagccaggtcagatcttcccaggaaatgtgccttctgctatgcggtcatcccaggctgagacccatgagacggggcagagggacttgtacactcgccggtaccactcgcacacggagacgtcaccgccctttgccgtcattgccttctcacagcggtggaagtccaggtagttctgccagcagttcttagtctggttctggtttgggaagcggctgtcaaagggggcggttttgtagttcttgattttagtcttgatgtcttcggccatcctgactcctaaagactgtcccggagcagcgttacttcaatgtgaccctttgcaaagac

SEQ ID NO: 269 - DNA, 629 bp, Rattus norvegicus
  Genbank Accession No. AA946046
gagaaagtagtaaagatttttatttgtcaatacaagataacacaaataaattaatttttacaacaatcttagactccagggtttctctatgaggttagctcattatgtaaacagactactatctaaaatgatcgagcaattatatgagtgttcaaaaccaacagaccatatccttccccctttcctcggtaatgtgtgttacagaacagatgaggttaacttggtggaaaatggtctcagtgttatcagactacagtggcaccaagttcatgtgaacctgtacctgtcatcttcttctctaacagagctgaagtggttgtcacacctgcaatcccagcactgggaggcagagatgggtacatcttctgactgagtttcaggctagccacggctacaaagtgagacatctcaaacaaaacacacaattaaaacagcataatatccaggaactaggggtgacacgcagtggtagagcacttgcctagcatgagccctgtctgggttaatcttcagtgatggaattggagtgggaaccatttgccagtatgaaaccaacatactgaattagaggttaaagtgcgaaagagaagaggctgcactcaaagcaagcagacctgtggatctctgta

SEQ ID NO: 270 - DNA, 447 bp, Rattus norvegicus
  Genbank Accession No. AA946108
ttgtattcataaagtgctctaaacaagatgttctttttagcagttggggaaaaaggttctctaaaaggcatttaattcttagtggaaaaataatattaacaaaagccttgtgcgaatgtttgaatgacaatttgctcattttcttcatgaattggggtttgatagaaaatgcatatgtgtcactgaaagacagagtgatgggtctgtgtggttggaactcaaaatgacattgctctgtcagtgtgtgctgtgccggcttgatggctttgatgggggaggggtacacttggctggtggtacttccaaaggtgaatcttgctatgtagggttagtggtcagggcagccattcaggctgacagaaccttggacttctgtggcttctgtgatggggacagggacatggttgacttgaatattcttcagacagccaaaaaatgagttccaca

SEQ ID NO: 271 - DNA, 465 bp, Rattus norvegicus
  Genbank Accession No. AA946189
  misc_feature (1)..(465): n = a or c or g or t
accacaagtgacttttatttgtgacgctcccaggcgcagcccagacacagacacaacaggaagcaggaggtggccaagcagccactttggaagtcacagggcatctcccacccagctcaatccctgctacacactctgtctcagaaaacgctcaaagagtaggcccagcatgtggttcaggcatgaggggacctgcccttccctccccaggatgaagaacagggctgggccagccaaggtgcttcttccactgggtccaagagccagggtaccccaggctattccactcctgggctctttggggttggcccccggctgctcctccaagccacacagttaaggccagagtttcactttctaatgcagcccatctctgacagtctctgttccctangcacggtggacacagcaagacacagcacacagactaattccccagtgtttggtgggacacgaaggcaggac

SEQ ID NO: 272 - DNA, 594 bp, Rattus norvegicus
  Genbank Accession No. AA946428
  misc_feature (1)..(594): n = a or c or g or t
agatgtctggacagcaaagtctttattggtaggtagtttatgaacagcttacgcttatttcatttacaaatgaaatttgggaataattaaaaaaataagttaaagactccaatctacatacacacatccattaactattttctcctaggtcttagactagaacacaaagcaataagagctgtaaccttactttgaatagtgaggaggatcataatcataacttggcctttatctgggtttaccacgaaagcagttagcaaacagtgccgcacagttatgttttagtcaaaaatgaggttcagacacaatatggtcccatacggtcctatctctttgtgacatcataagcaccttatattttttaatatttgttcaatggaactccccggggtcatacttctcaaaatccatcccaacaagtggtgcatggctgcaaatgatgatgcttggagaggaatttagctgtctactcagtctgcaaatcacaatgtggtggccttagtagttctaatgacttacgtgccaggaaagggtcccccttccccatttgcttaaaaagatctagctgtgccagtgccanaagttacttacttt

SEQ ID NO: 273 - DNA, 716 bp, Rattus norvegicus
  Genbank Accession No. AA946467
aaaaccttatttaataaaaggtcttaagatacagaacattcaaaagtaaataagttacatgggtacattacaatcacatccgcaagattctctttagtgtattaattttttttataaaaagcacacaaaaaataaaattttcggtctggtctatcacaactgtacacaaagaggtaatatttatatatatgtacactatttaatatgtaacagtcttttttaaaaagagtgccacaggcaacaaacacatgaaaggcagtgtctgaccattttgtttcaaaataaaaggaatatacttactttatgctattaaaatatctgtacaataattacagtcaaggctgtttctgtgctgtcctctccaacaaggcctttaatttaagagacaaatgaagaagagctctaacagctgcaaattttttttttgaggaaacaaacacagccaaatgtgggttagacacaactgttttttttataaaaatatgcatacttcctgtaaaaacctaagggtttaggctttgccagtctagtaataaataacaacccagaaaagtgagccccaataaaaacacttaaacagctgaggctggagtatgtgttgtactcttcccctccatctttaacatctggcacatgagaagaaagaggttaggtgactgaagcagttaaatataggcaatccctttagacatcatcggcacagggccctgtgccaa

SEQ ID NO: 274 - DNA, 654 bp, Rattus norvegicus
  Genbank Accession No. AA946503
aactggggacatgtgtttattcagcagaaagggggagcccgttggtggggcagcgttaacacaggtggatggggagagctgatcaaataagagggatcagatgcttggtggaatcatggctggtggggcagccaggtgattctctggcaacaggaaagatggagcggcagacagacaggtgggacctgaaccatcaggccactgcacatcccagtcagccacgctcaccgtctgttcagttgtcaatgcattggtcggtgggaacagagaaaacgatgttgttatccttgaggcccagagacttggcaaagctgacgaatcgctccttcagttcatcggacagccccttggttcttccgtacagggtgactttgaagtactgtttgttttcagaggtcttctggaaaaataccatggcaaactggtcgtagtcagtgtcggccacttgcacatcgtagctctgtatctgagggtagctgtgaatattccccagggtgaactggccaggcctggagcttggaacgaatgttctgatccagtagcgacagccctggcccctgacgaggatggaagtgacgttgtagctattgtcttcctgtaactcatagatggtgctgtacatggtaaagcggctttgtctttctttctggaccg

SEQ ID NO: 275 - DNA, 501 bp, Rattus norvegicus
  Genbank Accession No. AA955206
ttttttttttttattttacaaggctttaatgagacatgaaatgtaacattaattatacatcaatgaaaagaaatcctaaacgagagtttattgtaatcacacatatccattccagcttgaaaactttctgaggggcgaggggcagctattaagagccccggaccagccagcactgtgtgtgactcccatgcatcctgtgctttgtacacaagttctgtccatcagaggctgaagacatttgctgcattattacttttcagaaaaatggctttctcattcggtgatgggtgactcaaccagattcctaagaaattagttccactcagcattttaaaggataagaatgttcagccaaaaagcgatagttaagaccagcgttagccaccgagatgaagccaagactctaaaacacagacttgccaatagtgtccacctatgaggactggcatacattagtgaatagttaaggccaaggactattccaaccctcgtgccgaattc

SEQ ID NO: 276 - DNA, 361 bp, Rattus norvegicus
  Genbank Accession No. AA955282
  misc_feature (1)..(361): n = a or c or g or t
tttttttttttttttttggtgttttcaaaattttgtttattttgggaagttctaagtatcaacagggatcttgtctttattctcctcccttcttttctggtgcctccctgaacttccctcggcgcctccctcctctttgatgtgccgtaaattgtccagatctgtcacggtctatccttccgttcagtgtcttctcacatagacttgccgagtttccatttggatttgttttttcacttgtcacctacggaggcctttttcatccaaaattgtctgatttactgtanggaagatctgttggaatgtcgtcctggttaactgttgtgcggtcccagatgcctttgcagtataaaatctctgt

SEQ ID NO: 277 - DNA, 508 bp, Rattus norvegicus
  Genbank Accession No. AA955298
tttttttttttttttttaaagatgagcatttattcactttacaaagagaatggtattaaattgccataaacagctccatttatagacaaagaacaactgtacatcaatcgcaccagcagcttgcccaggatgcccttcccgcttcggctgtgcagcctgctctgtccctgatggaagtcctcccagggagcacttttcttagtcacaggtgggaaagcctcgcatctgctcagtccttctgcagacgacagctctccatctgcacccctgactgaacgagttagtactggcccactctttagaaacaagacaaattactggtaatttgaaaaagctgtgtagcacaccaaaatacttatttatacatacataaaaaatcttgagtaagatttatcattttgaaagataaacagataccctagccctgctaagagcgggtaatgaaaaggaaccaaaatgttaaattactgaattataaaaatagtctctttggaaaaaaattccagca

SEQ ID NO: 278 - DNA, 149 bp, Rattus norvegicus
  Genbank Accession No. AA955334
cactacacacaattttaatgtgaaagtaaatacaacatacagatgtacagtaaagctgatagcaaagcaatctggtagcttaaggcaagttttaatggagattagtttagaaaataatgatgcaatgacgtcatcgtaaatatggatta

SEQ ID NO: 279 - DNA, 222 bp, Rattus norvegicus
  Genbank Accession No. AA955347
tttttttttttttttttgcttttttgtttttcagagcccagcaaacacaactttattcagccttcagagacctgcgtttggccttagctcgcccccaacagccagcccccaacagccagcgctgtttgctaagtctgattgctaaggtattttaccagtcactaagtcacagcgtgcctccagagcgcaagcctttcctgtgcaagtgaagtctgggggtgg

SEQ ID NO: 280 - DNA, 220 bp, Rattus norvegicus
  Genbank Accession No. AA955350
tttttttttttttttttcaaattaacttttatttgaaattactcttccccacatgtattatttaggatcctatacaataacccatgtaaccaatgtcccaataccaaaatttctaacagcaagttatacaattgttctaggtaataaataaaggttgtccttcagtgattaagggaataaagtttccgtaaacttaacataaaaatcacactttaagttt

SEQ ID NO: 281 - DNA, 505 bp, Rattus norvegicus
  Genbank Accession No. AA955393
tttttttttttttttttcgtgttctctcaaatcatttattcagttcataatggcgcatttgaacaggatcagcaatcttggcagacaaaacacatatacccactgaccccaggtaagccagccccccaagggtttgttggtcccggggacttcctctctgaggtgaccaagtgaagccccgtaccattggcactggcattctctttggtgtgtgacctaaaggctgagggaggaaagccagcaggaaactgaatatgtggcaggtgccttccctcacagtgaggggcttggcttgtaaaatagagcaggccacaagaagagacctctcagctaaaggtcccggaagtagatttggacatcattttaagacagaatggtcattttcaaaggggtagaacttgatgtcccacataactttggtaaaatgactgtttgactgtacattttttcctgttttttgtttttgtttttgtttttttaagacagggtttctctcctcgtgccg

SEQ ID NO: 282 - DNA, 495 bp, Rattus norvegicus
  Genbank Accession No. AA955540
tttttttttttttttttactagaaatcatccagtcatttatttttgtttataccagagatataatgaacatattaaaaagaaaaaatgtttttataccaacatgtttttattgtttgtttctagactcctccatttagaaaataggaaccacggtttcattaagctgtggctccttttcctttaacctaagcttagtttaaggaaaacttccctcgtacaattatgtaactaactttaatcaatacatagtaattatgcaagcctcaatacagtagctaactttttgaaaatgacttaacacaaactattaacaactaccttctttgaaaatttctctatgcaagtatcagaacagatttacttctcttttaattttcatttcctattttttgggtatgccttagaaaagtaaaattacatataaacattgtcaactactttatttgtaaagtcaagataatggattatctcctctaagtaattaaattttgcaa

SEQ ID NO: 283 - DNA, 474 bp, Rattus norvegicus
  Genbank Accession No. AA955790
tttttttttttttttttcacttgacgacgtggtccttttatttgaactgaaaggcgtcatgacaaagtgcaaacacctctttggtaatgggctggatacaagaaacataaaatggcatttggctgttggcaacagtcagaaaagtaaataaatatgtacactactttgaatcacagaagcccagtgcagtggctagtcagaaagggtgtctgggtactgcccacagcttgcaatgaggctgtaacatcaaaatggagatctgcagacatcttggtttgaaatacagaagttaatgtaaatcacagccagcttctcacacaggagcagaggacaaaaacccttggcacctgtctaagctccatgtacacactgcgtgccttagcacaagacatacccctggtgctcttgtgaaataccagatatccagggcaggctctcccaccattctatgcctgagtgattacatggccatca

SEQ ID NO: 284 - DNA, 501 bp, Rattus norvegicus
  Genbank Accession No. AA956278
tttttttttttttttttgcatttataaaaactgcagatttattcagcgagggcccgtgtccaagaagctatggtgtagaagtcggaggacctatttttcctcttctcctccccctcacttcgtcttcctggagggcaaaaatggtctggaccctgaaatcctaacccaaataaaaaaaaccacaaaactgaggttccaaaaaagttaaagaatcttaattccttatagaaaagagagaggagccaaggcaaatggggaggtatcccaggggtgggggaaatgccccctacttggtgggatacccctcctcttacatagctgcctctgatgggacaaagcttggggtatagcatttaaaaactcccacaccccattttatcaaaaccaaagagaacaaaaaatttcccttccccccacaaaacccaaatatatatatatactttttcttaaaaaaaaaaattccaaggcattaaagcgttaaagtgaatccagaacaagaga

SEQ ID NO: 285 - DNA, 406 bp, Rattus norvegicus
  Genbank Accession No. AA956414
tttttttttttttttttagcccttgacatttatttcatggttacaggagttaaaggtgcaccctaattcatcatgtagcagtagattccccaatatttatttcatcatgatctgagttcaggagtaccgccctgagatgaccctagtgcagaacagaaaccagaaaggggaaggtctgtccactgcccttgcctccccagtcttgacctctttaatcaggaaaagcttcattgaggcacccagaccctaaggataagaatcaacaaaacgcacaaactgtggatccaagccacagtcttgatgctttgtccttccagagtgaggaaagcagtgtgcaggtctgctttttggcatggctcctcggagcagcccttctagctctgctaagaacactgttcctgtctca

SEQ ID NO: 286 - DNA, 439 bp, Rattus norvegicus
  Genbank Accession No. AA956499
tttttttttttttttttggagtttgatgtttatttttagcaggaagaatatgctaacggtgatggcatcaacagaagatacgccgtgtccaatatctgcaatagaagctcaacagaagttaaagaaactgtaccaaaaggctgaagacaaacactgctgacatactcaccctgagtgctgcaaacagtgaaaaagcaatgatgcgttaagactgaagaccactacgacatcacaaacaggtaagtcaactatgaaattcatgttctaagaaactctattgtatcttctccatttcaagtgggcaacctcttccaggacagagcatagcaacaataactgaagaacaagtttatgtgaacagaaagggagcaaatggaaaaaggacagtgcaaaattaggagttgagcatttggagtggaataatcacacagctctctca

SEQ ID NO: 287 - DNA, 359 bp, Rattus norvegicus
  Genbank Accession No. AA956659
tttttttttttttttttctaggaaagaaagcggtttattttcctaccaagcaaaacaaaatgaacagggtcaatcagaaaaatgtcaaaggaaaatcacaatgaaataaaatacagaaacacagagaagtaaacttccgcctgatgaagccggagtacaaacagcaaaactaacacacacgagagcctttcttgctagtgtcctttgatttatacatcatcacttctgtttataggaagtaagagagtcctgttctaggtgaacctcacaccacagctcgcttagctctccaggtccaacataacaaacctcggggctggctctctcaggccataaataaaaagcccagccaactctgg

SEQ ID NO: 288 - DNA, 226 bp, Rattus norvegicus
  Genbank Accession No. AA956684
tttttttttttttttttgagcatcagaggaatggctttattgtcttctttcttcctcagtttcacagagccaagtcaaagccctcatggggaaaacaaagccatatggggcacagccattctgaaaccaacccacagttcatacaccaaggaaaaaaaacccaacagaaatccaacaaccacccaagcatcatcctaccccaagctggaccgggttctgggctaag

SEQ ID NO: 289 - DNA, 297 bp, Rattus norvegicus
  Genbank Accession No. AA956813
ttttttttttttttttgccgggcaacacgttggttttaatggcattgacatccaggcagtcacatgtcagttctgcttggcaacttccaagggtgaggggctgcacagtgcgagggaacaggctccggtgggatggaggcgggcggcgtggcagactctttcctttccagtgcctgcgtgctcttcaccctgggcatgttctccactggcctgtgagagtgcggatgaactgggctggggcaggaccaggaagtcaagaaaggaaagtggtcaagagacgtggctacaatttctggc

SEQ ID NO: 290 - DNA, 542 bp, Rattus norvegicus
  Genbank Accession No. AA956907
tttttttttttttttttccaattatgtaagtattttatttatcaccaaagaaataaaacacagcagcaagttctgtgttggcttcaataagaccaaatggttactttttttttttttaaaacacagctacacactccaaaattgaagtcaacacagtcatcactacaaattacttgttgaaataatctatcctgaagaaaattaggaaaaagaatttaaacaattcctccaaaccacacatttataaatattgtcatatttaaaatgcttgaaaggcatgaattagtggaaaagcagttttcttttggcaacagaaaaaaagaaacccacaacagtttaccaaatgctctagggacccaaagctgtactgttctggacctgcacttgagcagcatcgtcatgatgatgactaaaaaatgcttttatactcacctctctcaagtaagtctatagaaaaccccattacagccagtgtttgtaatgtctaccacactgatcagaagctataaactgcctaaatatatttaacagtaaatacctaa

SEQ ID NO: 291 - DNA, 385 bp, Rattus norvegicus
  Genbank Accession No. AA957123
tttttttttttttttttgccttttcaatctgctttattaggttcacaatatgtcatatggaccttcccatgcatctgataaaagaattacaggccgagtaaaaaacacaagtttcacttagaagttggtaacaggaagagatctacataaaaggagtaacctcaaaacttgtacatcacaaagcaggggtccccatagcatcttcagagacaacctcaggactcagggcataaggcaaaactcatcattgtggtcatggtgaggggggtcagtgctcaccgcccgcagactatggctcagctgcctttccctcaacttgcccatgaggtgtctcatatcctccccaaacctttgcacattctcatctctcatcctgccctgggcc

SEQ ID NO: 292 - DNA, 344 bp, Rattus norvegicus
  Genbank Accession No. AA957125
tttttttttttttttttgtttgtcagtatctttattcacaaatcagtgtaacagtggcactcagttgcagtgttccatgggtcagagatcgtgacaagaatacgtacaacagaaaagttatttacacagagaagccattcgatatgcagccttgggtagtagccccagctctccccattgattctcctagtttggggtttgggttgggtagtttcttgggtcttctatctgtgaacgacggtgtaacagattccacagaaaccagacttctgaggataagcagcagcagtgggagaaaggacagcagattcaccactgtgcctatgcttgacttctgtgtgtcc

SEQ ID NO: 293 - DNA, 155 bp, Rattus norvegicus
  Genbank Accession No. AA957244
tttttttttctttgctagatcatatggtgcttttattgatgcctgacaattgggcaagtccctttctgacaacagagcactatgttgaatcctgcctgcaagaaaagctgctccaattcacttaaggagctggatggcagtgctcaagggggcca

SEQ ID NO: 294 - DNA, 430 bp, Rattus norvegicus
  Genbank Accession No. AA957270
tttttttttttttttttaaagttaaagattcttttattaataagtctccctcccctccaaactttatccccaaaataaatatcacccccttgggggatgggttgtgtttgtgtgtactgggaccagccctcccagagggccagcccccttagtgttatgaacaggtccctcaatctaacccactcccagggctaaaactcagggtagtggcatttcagtccatccgagtgggtggaacccagtgttgtgtctgcccctcaagtcggccaggcctccaggacttgtggggagcaagagattcccttgtgcaaatgctgcagatccttagtatgagtcgctttgtgacctagcttgaggctctctgtctgccccagaaccagagacagggcaattagacaccctggaaggctcccctgaaccctaagcccag

SEQ ID NO: 295 - DNA, 441 bp, Rattus norvegicus
  Genbank Accession No. AA957307
tttttttttttttttttcaagcctggggaggagactggggaagtcttgtgccctccccagagatgctttattgcgtggcttcaccagtcatcagtgaggagaccctgggcccattcgagatgatgggaacacccgcgcagtacccggcagatggacccagatgctgtgcagtcagatgggacagggtgaggagtggtactcggcctctctgttccagggcagacctgggatcccagcaggcagcaagtaagtctggcaaactgggaggaggcagtgttcaggcctcagtgacctccatgttctgcagctggttctccagggtgacctcttttgctttctttttgctgccttcatgttgcttcttctgcttcttagatggctcctggtcaataggtgctggcttcacaaatgggatcagttcttgcctcgtgccgaattctt

SEQ ID NO: 296 - DNA, 557 bp, Rattus norvegicus
  Genbank Accession No. AA957410
  misc_feature (1)..(557): n = a or c or g or t
tttttttttttttttttgtcataatacttttttttattacaatattcaaaaaactgggtatgcaagtttaggggatcccaagaccccttcttcaattgtaggaatgtgccatctcaagactctatagtcaaactgtaaagaagttcagatgtaaagaaaaatgaaaatgtaatttcttcataaacgttctgttactactaatcacatattctcttgtaaaccctgaaaaatttccctgtaaagcaaataatatatatataatatacacatattatatatatatagtgtgtgtataaagtattggtagctccccttcccaagagatcagctgttttccttaatcatctcttattagtgtcgacaaacagctaagatacatattactttgagaattaaatacataattgtgaaattcaaacaagccaaagggcaaaagcactatgtggatggcacacctgnggtacatcaccagagtatctttctttctgcgttgccacctccctcttttgcagactgactctcaccaaaaccctcttttattgcaagcacagcctcca

SEQ ID NO: 297 - DNA, 337 bp, Rattus norvegicus
  Genbank Accession No. AA957452
tttttttttttttttttcacgttctgctcattctgtcgttttattatccaattgtccgttacagtcccagtcgctttacagaaccaaccgtttccaccgctgacactattgtaaaccacatcggcgagttatacagaaagctctgcgtttcaaaaaactagacgctttagtaacaatattacaaaggctttagcttcaaaaataaccgaaaatgaaaaaaataaacttttaaagaattagcatcataaaattaatttattccaagtaaaaatacaaaataatattatgacgttgaccagatatgaaagtccctcccagaaacaactctagtaatgat

SEQ ID NO: 298 - DNA, 459 bp, Rattus norvegicus
  Genbank Accession No. AA963102
tttttttttttttttttaaatatcaatgaaattgttttacggagtttattgacaactggttctggataaagttcaaaaaatgcaatttcttcaaagtaaaatagtgcttctgaggtcttttaaagtatttttttggtacaaaaaataagtgtttttctcaatgcttatttcaatactttgctgtaaattaagaagtgtttctcacatcgaatggttccgttaggcacattcaagtaaaatcataaaatatccaagttaaacaatgagacagccagacatgtggctttgataaaagtccgtccattctctggaatggaataaactgtcacttcccttaacccaaggctcgtggtttttggtgttaatatccattccctaacacacagataagcttcttttaaaaaaaaaaccaaagagaaagaaaagttcacttattctgcatccagaagaaccagcgag

SEQ ID NO: 299 - DNA, 557 bp, Rattus norvegicus
  Genbank Accession No. AA963240
tttttttttttttttttaaaaatgctgttctaattttatttatatgtttggttattaaataaaaacaaaacctataattacagtcccagggcttagccagaccaaatcagcagttctttggtaatgtttggcatgtaataggactgtcatgttgatgaacatgattttgatcaggaaactattaaaggttgactttcattagaaaacaactagagattattttaattagaaactatcttaggctgaagtcttcagaactcttggctagagttaaagaatataaacaaaaacatttcatttttcctgataataaacgaagttacttggcattttttcccagttacacaaactccattaatacatgagctaacagaatgtaaagagtattctgcaataatcttctaagataactttagtataagttatgagaataaattaagtcaattgcagtcgttctttgacagcaaaaacaaagaaaaccaaatgatatacagaaagtatttcccaccgagtaagttgaagtgtttacacatttgttactaaactaagtaccgatt

SEQ ID NO: 300 - DNA, 345 bp, Rattus norvegicus
  Genbank Accession No. AA963703
  misc_feature (1)..(345): n = a or c or g or t
tttttttttttttttttggattttgactcctgattttattattcaatttctttttctactaaaagtagtcttcggtggttgggaagcctggcctcccaacaccagagtcagtcggagctggtttttttgttgaaaggagtgggcgggtgggtgggggaccgggatgagggcagaaccccgctctgctggtagtcttgggtggagaagacgaactgcacttgacagagcctggggtgcggtgggagggggtgaggcangagtgacaagctggggaggggacccacctcagtcnccagctccattctcctctaatgtctctccactggtggcgttctctgcagtctt

SEQ ID NO: 301 - DNA, 242 bp, Rattus norvegicus
  Genbank Accession No. AA963746
tttttttttttttttttgcactatacgttttatttataagactagaacagtcgagagtgttcgtttaaattaactaatagaaaggggagaatggcatatgagccgctatttacagaagacaaactgaactagaggagatcagcttttgttacaaaacaggaatcacgacattcacagacgattgttttataaacattgatggaaatgttttatacttgcatactttcttccttggggaaaaa

SEQ ID NO: 302 - DNA, 470 bp, Rattus norvegicus
  Genbank Accession No. AA963794
tttttttttttttttttaactggaagaagcactttatatttacagttcaactgataatgccaacatttgttactgtacaggtatcacaggttttgtggttgcaaagttatgtattgaagtttactggtattactacccacctaaatctaaactaaatctattgctcccatctgcaatttagcttgtaaattaaagtgttctaaacatgagtcaattatgaatattaaaagggaaagtgagacaaaagtattcccaactagattatctacattaatatgttggaattctatattttgctgtcatttttgtctttaaaaaatgaaataacaacgctctatcagtcacacagaggacatgcagatttagcagtattgatattatactctgtttggaaatagacaccctgtacccacatgtacaccaacagcaggccacacattaacagttgtaactaagcactgtgacaaatt

SEQ ID NO: 303 - DNA, 397 bp, Rattus norvegicus
  Genbank Accession No. AA963990
tttttttttttttttttaactttattcagttttaatttctgaaaaaaaaagagtttaaagtacttaagataaagatgttctatatcattctagagagcctaggaaaatccaatgggtggaaactagaagattgatgtgggtttaggataaggatggtggtagttgttagttctgagacatagtcttctgtagttcactcagtctgtcctgaaaactaccctaaccaaggatggtcttgaaatcctgacctccttcctcttcctcccaagtgccgatattacaggcatgtacaaccacacctagcttaggaggaactttttaaattaattggcagctgtaaagatggcttaatggtttagagcactttctgctcttccgtggggcgtgagttccagtc

SEQ ID NO: 304 - DNA, 220 bp, Rattus norvegicus
  Genbank Accession No. AA964147
tttttttttttttttttaaacaatcagtactatttaattggatgtctgtgccatgatggttacaaactatactctctgctctgaggaatcaaaaccaaaccagaataaagatgaacaaacatccccaaccccaatcccaagagagcagcaagaaggaatgcaggagtcttacagagcacactgattccaagggcatagcatggcattccggatttggagg

SEQ ID NO: 305 - DNA, 531 bp, Rattus norvegicus
  Genbank Accession No. AA964275
tttttttttttttttttaaataagtaagtttccgggttctcatattttctttttctttgaatatattgcacaacattttattattagaaaaggctttatgtctcaggcaaaaagtttttctccacccacgaggtgctaatgtgtgttgttctctagaagaggtaagtggttgtctgtgtggccatccgcaaaggggacagaatggacgggcttgtaggatccaagtctgaaacgacagcaaattatttccactataaattttccaattccatgtaacatgcctgttgttgaaaagattcctccaataataccacagagtcttacaaaaaactgccagaaaggcatgtgttcctcagtgactgtcaccatgtgagaactgagatcgtatttcataaatattccagagacgccgtggctgcctgcagcatggttgatgatgcgttccctttctgtcacagagaactgatgggtatctgcggaaatcttgtatgtgtgtagctttgttggcacaactgtaatgaaatattggaa

SEQ ID NO: 306 - DNA, 474 bp, Rattus norvegicus
  Genbank Accession No. AA964611
ttttttttttttttcttcccaaaaatattttatttattaaacaatatatccataatccatgatccaaaaatacagatatacatctttacattatttaataaaaagatttacaatagtatctctcctttacaaaggggaaataggtaataattccttgaagataaaatgtggcattcacgttaaagctggatcatccaatggatggagtgtggccaagagcgaacgccaccgcacattctgagggaaaagacacttcttagacctcccctactttaaagctcctctgggcacaggtagtggagaccaatctctgtccaaggaaacaaggtttcaaaacctcaaatgctcctgtttgatttcaaatgctgaagacctacctaacctcctggcataacagggccaaccttggcaccgtgatcacgtggacgagttgctctctgggtggtggtattgcttgaagcatccctgccaagg

SEQ ID NO: 307 - DNA, 437 bp, Rattus norvegicus
  Genbank Accession No. AA964752
  misc_feature (1)..(437): n = a or c or g or t
tttttttttttttttttagttttgtaaacagctaattttattccttgataccaattggttgttcatgatacatacttttctgcaagaaggcaatgaatgaaataaaggcatagaggggaaattggggaaaaaccacaatgtagtaggatgtcacttaattaaactcgtacttgattggctagttgttttagttacaatttcaagtcttatagatacagaattctactttttttccagaacaaacatatatgtccttaaagacagtgggggagacaacagatttttaactgctgagcttcttacttctaaggagaacagtcaacattgttacttcttgtccttcacagtctggaattcatgtgggtcattagcttctccaatttgattgctanggctatgtttcctttaatcttcaactttcctgacataaatgccat

SEQ ID NO: 308 - DNA, 486 bp, Rattus norvegicus
  Genbank Accession No. AA964756
tttttttttttaaagacaaaacaaatgcattaacacacatccaaatgccacagcaagcactcattaggttttataaaagagaaaactgcattgtggtgtcaaatgaaaaccaaaaccattttaagaaccactacagcttatggtgacatggatacatggacaactaagaagccagtgcatgttttcagctctgtggaaatgcatgagtaaggtgaagtcatggaaggtggagtggccacagtcacaccttcagacccttttccccactttatgttcttcttctgacttagtcagcaggtaaatgtacaaagaacttaatatcaaagaacacttccaaaagtcaaaaatagattcaaggtcatggctaaagttatcccagaggttaggggaggggggctctccaaagccatatgtcacaaaatgccaggcactaaatctagtcacatgtgcttgcagtaaaaaaaggaacactgatccctcgtgccg

SEQ ID NO: 309 - DNA, 395 bp, Rattus norvegicus
  Genbank Accession No. AA964815
ttttttttgttttttataacaatgttttattcatttattatcatttatttttatcttgtgtgtgtgtgtatgcatgcatgtgtatgtatgcaagaggggcgtgtgttcacatttgcaaatgcaggtacacatatctggtatgtgcagttcagaggagcaccttgtgcagcagcccttgttttccaccatggctgtggcaggatctcttgtctctggctgtgtgcaccaagtgagctggctcaggggcttttgggaatttttcaggctctgcctccggtttcttggcatgggttctgagaatcctaacacaggtcttcacacagcccagagttggggtgattctgggaagtcggctgctgtgccggtgatcggtgatcgtctccaagttcgtggag

SEQ ID NO: 310 - DNA, 310 bp, Rattus norvegicus
  Genbank Accession No. AA964832
tttttttttccttttttagtttacaaaatgaattacggtcacttttaaacatcatgaaagaagaaatggatgtacacaccttgacacttttctagcattcttgaactaattcacaaatgcgagaaaataaaaaagaaaaacgggagaaatgaggaacataggtagttcggtgttaaaaaacatttgcaggaatgatgtgtattgttacagagagaagggacgcttccccttcctgttttgcgtgctatgagggtcatttttaaaacttttttttattataaacactattaaattcagaccgcttttttgg

SEQ ID NO: 311 - DNA, 289 bp, Rattus norvegicus
  Genbank Accession No. AA964962
tttttttttttttttttccgttttgtcacctgatatttaatgatgtcaacagacagcagggcggttttcacaaaagtgtttgtgacatacttagtgcttcagactttctgagcaacttggcactaataaatctggcacactcattgccagcaatggatgtgtcaccgggaaaccaggtttgtgggtcagcatggcttagtggatgaggatgtacatgccttcgacgttgattatcactggccatgactacttgacggattgttgttgcaatcccagtgagaatacacag

SEQ ID NO: 312 - DNA, 375 bp, Rattus norvegicus
  Genbank Accession No. AA965113
tttttttttttttttttaaaataaaccaaaaggaatttatttacaaaatgtcttatttcaacaacagttacagccaagaaacaaggtatcaagcaataatgaacgaagagactccactaatcgtgtttaagctattatgcccagagtagcttctcttgctagctagaaagatgtccctctgagtcctccacttgcacaatggcatcatttaaccaatgggggctgtgtgagcagcacagacatgtgtgggttcagctgagtcacaggtttcttgactttttctcctcccttgtttagttttttacttttctccttctctgttgactccttcctctttttctcctccactatcagctcctttctcagcttcctctt

SEQ ID NO: 313 - DNA, 498 bp, Rattus norvegicus
  Genbank Accession No. AA965122
  misc_feature (1)..(498): n = a or c or g or t
tttttttttttttttttcgaaagccacctctttatttcgcattcctgccgcgtgaccagtttgcatgagctgggaatgagagggttgtggagggaaaggcagagtgtctgggggcagactctcctggaaatagtagatgcacactgctcaggcaggttagactggagaagcaatttcacgataaaccctacagaatgagaaatgtacaaagttgttgggtggctgctggcctcttgcctccccatgggggtcagggttacacccatcagtcctgcacaaaggtcctgnagttgacctgnggagctgcaaaatcttccctgngggacaagaacagtcttgctcacccagcagatgtgccaacgaataggcacatgggtgtgtgcccagttgctgtggtttccccctcaggttccatagctcctcaggtgtgtcttcctcctgcctctatgtcctccccttaaaggtgttcatacaggtgtaagtccccgagaacctgtg

SEQ ID NO: 314 - DNA, 258 bp, Rattus norvegicus
  Genbank Accession No. AA996727
tttttttttttttttttaaggcttagttcatttattacagcacaaatatctcagaacacactgtatcagaaaagacctggcagtaaatctaagacaaacagtttccactttccaagtttgcagtcggtcaagcaggacatagatgcggagcccttttcaaatgacacagttattctgaaagtttaaggtgctacaggaacatacaaccaaggacttcattgtggagaggagaccagattcaaatctgccttcccggtt

SEQ ID NO: 315 - DNA, 516 bp, Rattus norvegicus
  Genbank Accession No. AA996954
tttttttttttttgtttgttaatactttattagtattttctaacagacagaacataacacaaaccaaataaaaattttaattctgtagttaataaaaataactgacattctgattctttccccttggttaaagaaggagagcattgatagagcggttaggcacaattgacacttatgtacaatgatatgcacaaggtaattttttaacaattaaaatcctaaaatgtgctctttagttttcccttataatacaggagccaggctcccataagcgaaactttctactaagaaaagaattttacaaggagtgacaaaaagacttttaaacaagtccttaattaaggtgcggcaacaacggaatgaagttgttgggctaagaagacagttaaattagatctcaaacattaaaaatgtagttattttacagttactcaaataaacatgcattaaatgaaaatattgcacaaaattaaaactgcagattgtgaaatttatgttgttcttaatttatttttt

SEQ ID NO: 316 - DNA, 396 bp, Rattus norvegicus
  Genbank Accession No. AA997237
  misc_feature (1)..(396): n = a or c or g or t
tttttttttttttttttaatggggcaacatttttatttctgtacattgacatacaaattttccccaaaggtacaacagatgcgacaccatgcagacacgcagctgtgaatgacagttcagagctcaacataaacttgtgctgtgaacaggtaccgcccccgtcgacacatacagtcacgcggctcttaagaggaaaagcacacatggttgggttgcagaaaggacagaggtanggaagcgttcctcactagacacaacacaccatattgtttttccaaaacacacacgatacattagagtgaggtggtgtccttcagaacagggaggagttgaagtgtgggcctccctcaacccatgtgccacccaagggctgggtgtgtgatggtcacgagattc

SEQ ID NO: 317 - DNA, 357 bp, Rattus norvegicus
  Genbank Accession No. AA997406
tttttttttttttttttcccttttcaaggtcactggcctttttcctcaattgtaaatagttagtgtttattttaaaggtggtggagggagggtggggacataaatttgttgcatgagagtgtcaggttttctgtataagcatgcatcctctgacaggacattttgttgaaaataagcaccttgataaccaaaaccccttcaaaatagcaacaaagctttagttctgtattgatgaagtcacataaaagcctggctttatttttgtaggacttcatagctgagagtagaacatagcattggggctactgttggggtaatgcaaactaaataaacattcaactcttcaacctcgtgccg

SEQ ID NO: 318 - DNA, 284 bp, Rattus norvegicus
  Genbank Accession No. AA997599
tttttttttttttttttaatttccaaaaagctttatgtgaaatattctagaagccctttacaagccaaagcattataattcaataaaaacataattttatagatatatttctctatacaaaaggctgatcgttacaaaaattagaataaataattggaaaatgagtgccactgatttaaaaaagatatctctgattgcttcatggtgaaatgccttctatgtcaccaaaagatgagggcgcggacagctgctccgagcccgggctgtgagtcccctgcgaagat

SEQ ID NO: 319 - DNA, 309 bp, Rattus norvegicus
  Genbank Accession No. AA997656
tttttttttttttttttagaagggttgaacatcaatttttaataatgaaacttttatccagtcctcaaaattaacataaaaggcatgagaaattgaccacttctcatccccaccacggtgtaacaatcctttgttacaacatccatctactgtctccaaaaagcccaatacaaaacccacacattataccacctaatgttctaccaacagatgagagtttaacccacgttataccaggaagctattaccacggatacttcaaatcacatagctgaaaacatggagaaagggcaaggtaaaaaaatcatc

SEQ ID NO: 320 - DNA, 483 bp, Rattus norvegicus
  Genbank Accession No. AA997726
tttttttttttttttttacaaaaaaatcctcaaaattctttattctgacaagatgaggaagttggcatcagtgagtcgtgtgccttccatgagcatcacagcccacaggcacgctgcagaaaaagcagcgattccaacagtccccggcaacggctcccagtgtccaggtgcctgctgcaggttaggcggcctgctgttcccagcgtccggtggagcctgggctactggtcctccagcgccgagctcttggcttccacatactccaaggccttcgccttgacagcctgcacgtccttttcggtgccatgctgcttctcgtagtccaggtagcgcttgaagaagaacttcatcctcttgggggccaggctcagatgaatgacccgctcaaagatgtccctgacttctttctggctgccgtgcttgatggtcatgtcgatgtagactgaccagacatctgtgcgttttgggtaggtggtcagtgtg

SEQ ID NO: 321 - DNA, 382 bp, Rattus norvegicus
  Genbank Accession No. AA997800
tttttttttttttttttggcagtgaatttcacagagctttattgggtaggacagagggccacatttctacctgtttacccaccaaacatttaaactgctattgctctgagagatccctggtgatcttcatgatctccattggagcttgaagagagtatgatcaggaaagctcaaagcttccttccttaagcacaggcaatattatttacagttcaccttcacactggagatgaaaatcatactggaatctatcactaaaccaaatttacttttccttcttaaatgtctttgctacacagtttcacttttctggtgacttcttgttcttaatatcttggtgtatacaatgtcttcatccttcttcagagtttttgcatctttc

SEQ ID NO: 322 - DNA, 428 bp, Rattus norvegicus
  Genbank Accession No. AA997953
tttttttttttttttttacatggggaatctgtttattggggagacagggttagtcaaagggtgggctagctagggtagggtagggtagcaatttgtctggccctcgggaaacccaacttgaatccaaggcctcatctgcttcaaagccaaagtcttcctcgaccttaatctgcactggggccagttctggagtcaatgaagatgctgctcgtggtgcccgccgcctcttccgcccactgggcccctcgccaggggctgggctgctggggtctagggttgcagttgtcctttgtggtggggaaagtccctctttctctggaggttcattctcaacattgcctggggtagggacatcagtgccttggctgccatcatccttcaacacaatggtgaactggctatcccggtagtcatccccgtatgagtcc

SEQ ID NO: 323 - DNA, 447 bp, Rattus norvegicus
  Genbank Accession No. AA997973
tttttttttttttttttcaaatatataacaaatatctttattttgagatacagggtacttgtttatgaattataagacctatatacaatgagtcacacctccacaatcaagtatctttatatgctttttaaatgcaatgaccttattcagacttttctgaattgaccatgtcagtttttaaaattctctaaaataatgccattttatgataaaatacatttttgcaaaaattcagaaatgtagtaacatttaatgaatatgaccacgaaaagtatctgtaagcatgtgccaatgacttagcacttttttccagtttttatagttaaaaaaattgtaatttgacactaagcctgttttaaaaatattgttatactgattcatctcaaaaggcactattaatagtccttttgtaaaataccatcatatataactgtgaatgttttgccc

SEQ ID NO: 324 - DNA, 507 bp, Rattus norvegicus
  Genbank Accession No. AA998062
tttttttttttttttttcagcacagacgcattcacgcctttattacattttcttagcattccaagtcacaaataaggtctctgacaacaggcaaacctgtatttaaactcatagcgtcttcttctttaaataactgttactgtagggttgtgatttaatcacggttgtaaaaattgtgcaggtatctttaaaaaaattgcttctgtctttggtctccaagtgtccatctcagaacattaagtgacaggagccaacatagactgctaaataaaagaaaaatctaacatgacacaaatattttttaaaaaagacatcacgtgatttcctcgtagctgttaattcttaataacatacgaaggcagatagggagaacaggtccatcgaagttttattggaaaccttgatttcaagtaagattgcatgacactgtcggttaaaaatgtagtccagtcctaccagcaaactaactcactttccttgtttgctcaagcctccaggcaccggtca

SEQ ID NO: 325 - DNA, 484 bp, Rattus norvegicus
  Genbank Accession No. AA998516
  misc_feature (1)..(484): n = a or c or g or t
cggccgcaaaggtttattcttattatcttgacagttggcagcaccaatgttaacaaaccaattaaaaattagccaaaatctaagatagacacatgtacaaaagatatacaaattaaaaccattttaaaagtaatggataacataatttgtctgtggctataccatctacattcagaaatgattgtgaaattaaaaccaaagataaaaactgtacagcatgaactctgagcgatttccatttcagtctttcactctcacacatttagtgtctctggtgggttgagaagagaaacactgtgatatctgttaagcagaggaaataaaaacctattagtaaacattcatcggggagatcacagaacanacaatttatgcgtcccaagactggagaaatgctacttttatttgattagactaatgagtttaaaaacatttgatacttaggacacatatctgttcccttaaccatctcttaccagatgca

SEQ ID NO: 326 - DNA, 617 bp, Rattus norvegicus
  Genbank Accession No. AA998565
tttttttttttttttttgtgatttttgttgggcctctttatttagaacctggcggacgaggagccctgggcagttggtatgggcagtacaggaaccatttttcgacagtctggtcaccaagtttaagagcaatctaataatgtggaggacactgtcagctaactgaagatgaatgtgtgggggcttttactcaacaaccattcctctagagtctaatacaaaagtagatttacatttgtgggtaatctgaagctggtgatttctagtgcctttggtaataatcaataagccagcagttgcgcggcagagggatccacgcatggataaatacaaacattaaattagcataatttttaactttttgttcaaatatacatgtttttcccttttctcggccttttccctcggtccacattttccaatttccccccccttttttctttttatctttttgcactgagagcgagtagagattaaacattttacataaatgatttaaagctttacaccttgggaccagcgtactccttgcacatggtacagagtgttctcaatacattgcacagttttcagatttccacaaaaccgtgggctgctctgcgcaaccatctccggtt

SEQ ID NO: 327 - DNA, 557 bp, Rattus norvegicus
  Genbank Accession No. AA998660
tttttttttttttttttccgaataaagtttattaaataatatgtacagcgaagtagtaattcaacatgtctatcaaatcaatccacggcagtaaggaaaaacaataaatgaacagaaaaacctgtgtctgcgtagtacacgcgcttggtgtgcaatttaaatgcaatactctaataggttacatagatcggttttgtttttttctctcaataatgtcttcttttttggtagtaacctattccagcaatgtgacttaatactactgcagataaataggactgcaaacgtaaaactgcaaatatgatatgatagctgtcttctcttccccagagaacgagtgaatatgttaacaatttcccaggactatttttgtgctaaaggtccgcaagtgaattattcgaaattccttcatttaaataaaagtgttgggggggggaaacccttcgtgacttcattttactccctttctgctcaacttttaaaaattatttcttctatacaaggtaagtacatgggctccacaaagttaaacatacattacatatttacagtcccac

SEQ ID NO: 328 - DNA, 376 bp, Rattus norvegicus
  Genbank Accession No. AA998894
tttttttttttttttttaacttacaaataagtgtttattagcccaagttgccttcttttttgttggattcataggcatcacagacgacctaaggcatgacacactacatgtttgttgttttgtcaggaggccctgccagctgtcagtgctgggctacatgaaggaccctggtcaggtggcaggattctaatcacgtggtttttttttttttttttcaggtacctgccaagttgctgtgcaacccaagatcacaaagtcttccaggacgccccggtgcacaagaatcaaggccctataccaatactgaaggacttgggcctcatgctgtggtagtcatcttcccttacaggaactaatgctttagccttcaagctgt

SEQ ID NO: 329 - DNA, 435 bp, Rattus norvegicus
  Genbank Accession No. AA998910
  misc_feature (1)..(435): n = a or c or g or t
tttttttttttttttttacatgtctctgtttaatgacccagccagctctgcccagaaaaagctcatgccccagtagggaagtcctcctcctggctgctgtcccctgaagagcccaccagagctctcactagcagcatccatccagtcctgtctcagcgtggcagcctcatcttagctccttcaccaagctgtcgatggaggccagcagttcccggaagtagccgtcatcttcaccttcttggagctccagggaggccanggcttggtattctgcctggagactgcccagtgtccggctcagctccaggtcttgacggtagcggtcccggcaggtggcgaggagggcgcccagcgtctgcagcaccttctcccgagcgtcgtgctctggaagggccangagctgggccgtgatctcacaccagccctgttcccgca

SEQ ID NO: 330 - DNA, 200 bp, Rattus norvegicus
  Genbank Accession No. AA999169
tttttttttttttttataaagaaccatatttattttcatttacagcatcaagtatcataaataaacctaaacatcgcttgctgtgtgtgtaaaatacagggttccgtatggcactgtaaatgaattctctagggtcacagacatgccacgagatggagaggagactgtctaaagaggctgagagcaggggtggggtgcgg

SEQ ID NO: 331 - DNA, 4945 bp, Rattus norvegicus
  Genbank Accession No. AB000778
ccaaagttgagctttggaacaggccggcttcccctgtttttgtggatttgtaggatagccaatttccccccatctcgactttcaactgctttggacattagcttcataggaagaattcattctttagagtaaaatggagcgccgctttttgccaggggccccagcccctctgtttttaccctgtcagaagttagaatgtcactaaaaagtgaggcccgggtgaacacttctacactgcagaagatcgccgcagatatgagcaacctgatagaaaatctcgacacccgggaacttcattttgagggagaggaggtggagtatgatgcatctccaggagaccccacggctcaggaagcgtgcatcccattctcttctatttacaacactcaaggatttaaggagcccaacatccagatctacctctctggctgtcctgtaaaagcacaagtactggaagtggagcgcttcacgtcgacctcgaggatgccaagtgtcaacctgtacaccatcgagttaacacacggggaattcacatggcaagttaagaggaaattcaagcacttccaagagtttcatagagagctcctcaagtacaaagccttcatccggatccccattcccaccaaaagacatacgtttagaagacaaaatgtcaaagaagagcccagagaaatgcccagtctgccccgttcatcagaaaatgcaatccaggaggagcagttctttggcaggaggaagcaactggaagattacttgacaaaaatactaaaaatgcccatgtacagaaactatcatgccacgacagagttccttgatgtaagccaactgtcttttatccatgatttgggaccaaagggcctggaaggaatgatcatgaaaagatctgggggacacaggataccaggtgtgaattgctgtggccatggaagagcctgctaccggtggtcaaagaggtggttgatagtgaaagactctttcctgctgtatatgaaaccagacagcggggcgatcgccttcgtccttcttgtagacaaagaattcagaatcaaagtgggaaagaaggagacagaaacaaaatatggacttcgaattgataatctttcaaggacactgattttaaaatgtaacagctacagacatgcccggtggtggggaggcgccatcgaggagttcatccagaagcacggcactgacttcctcaaagaccatcgcttcggctcctacgctgcggtccacgagaacattttagctaaatggtacgtgaacgccaaaggttactttgaagatatcgcaaacgcaatggaaggggcaacggaagagatttttatcacagattggtggttaagtccagaaatcttcctgaagcgcccagtggtggaaggcaaccgctggaggctggactgcatcctcaaacggaaagcacaacaaggtgtgcggattttcataatgctttacaaagaggtggagctagccctcgggatcaacagcgagtacaccaagcggactttgatgcggctgcaccccaacataaaggtgatgagacacccagaccatgtgtcctccagtgtgtatctgtgggctcatcacgagaagctcgtcattatcgaccaatcggtggcgtttgtgggtgggattgacctggcctatggacggtgggatgacaatgagcacagactcacagatgtgggcagtgtcaagcgggtcacctcaggacagtctctgggctctctcacggcagcatcagtagagtctatggaatccttaagcctcaaggacaaacatcaatctcataaaaacgagcccgtcttaaagagtgtcgacgataccgacatgaaactgaaaggcatagggaagtccaggaaattctccaaatttagcctctatcgccaacttcaccgccgtaatctgcacaactcggacagcatcagcagcgtcgacagcgcctccagttattttaaccactatagaagtcatcagaatttaatccatgggttaaagccccacttgaaactctttcgcccttccagtgagtctgagcagggcctcactaggcacagtgctgacaccggctccatccgaagtgtgcagacaggagtgggagagctccatggggagactaggttttggcatgggaaggattactgcaactttgtcttcaaggactgggttcaactggacaaaccttttgctgatttcatcgacaggtactccaccccccggatgccttggcatgacattggttctgtggttcacggaaaggcagctcgtgacgtggctcgacacttcatccagcgctggaacttcacaaagattatgaagccaaaatatcgttccctttcttatcctttcctgctcccaaagtctcaagccacagcgcatgagctgaggtatcaggtgccaggggccgtccacgccaaagcgcagttgctccgatctgctgctgactggtctgctggtataaagcaccacgaggaatctatccatgctgcctacacccatgtcatagagaacagcaagcactacatctatattgaaaaccaatttttcataagctgcgctgatgataaagtcgtgttcaacaaggtgggcaatgctatcgcccagagaatcctgaaagcccacagggaaggccagagatatcgagtgtacatcgtgataccactgctgccgggattcgaaggagacatttccacaggcgggggaaatgccctacaggcaataatgcacttcaactacagaaccatgtgcagaggggagagctccatccttgaacagttaaagccagagcttggtaacaagtggataaattacatatcattttgcggtctgagaacacatgcagagctggaaggaaaccttgtcactgagctcatctatgtccacagcaagttgttaattgctgatgataacacggttatcataggttctgccaacatcaatgaccggagcatgctgggaaagcgagacagcgaaatggctgtcatagtgcaggacacagagacagtcccgtcagtgatggatggaaaagaatatcaagctggccgcttcgctcaaggccttcggctggagtgcttcaggcttgtcctgggttatctttctgacccaagtgaggacattcaggatcctgtaagtgacaaattcttcaaggagatttgggtttcaacggcagctcgaaatgctaccatatatgataaggtcttccggtgccttcccaatgacgaagtgcacaatttaatccagttgcgggactttataaacaagcctatattggcaaaagaggaccgccttcgtgccgaggaagaactgaggaagatccgtggcttcttggtgcagttccccttctacttcttatcagaagaaaacctgctgccttccgttggaaccaaggaagccattgtgcccatggaggtttggacttaagataaaccttttgtagttgagggtcttccaacctgaagactacagtatatgctgacttctaaggacttcacagccatagccaggcctgatgtcctcctgtgaactggtgtaaggatgctggacataaacagggcttcatcactcctccgacttgtccttgagaaaagtggctacatcctgttgatagcatatgctcaaataataccaaacatggagacaaattccgtgatatatttcaaaacccattccctttgctaacaagaatctgtctgtaactttgatccgggttgccaaacgttgcctgagcactgctgttcttcgctgatgtccgtttacacgctggggcccaccttgtcatccatacagcactgtttacaagattgcttatcaatgaaagacattggagaagctgccttgagggtcctcaaggatccaggtgatgcctgtacccaacctggtcctgatgtgagcttatttaccacgccaaaacttttctctctgttctttttcagtcactgtagggacagaacaggctttgcctacctacccacactaggcacttcttaacaacaggcaggcattaagtcctaatactgaagaagattccagttcccagagatgctgcccagctgtgtccttgtcatctgataacatttgtaaacatgtgcagcgcatgtcaatacatagcaaccagataagcacagatggagcctccaaggtgtcagtgggaacccagttcagataaaggacaatattcctgacagtctgtctttcttagccactggattgatagaaaaaaagttgattctctccactgtaagtccagtggatgttaatttgtcttccaactgaatcaaaggctttataatgcccttttcctaagaaacatgagtctaacctgatttacccttcagttttccactaggccttcttcaggggaaaaagcaatgattatacaagatctctcctttgcttgtactgtcaactacatagtaacattccaacatagcttccaaagaagcgataattcacattgttccaatgggatatccacattccctttcagatggtattgtgtcctttgtagaccaaatttcagagttccccttgtatcatgggagtgtctgtgggtgcctggaagcctggagcttatgcacgtgagataactatgtgactgtaagcaaaaggggttcactggagtaaaatctcttcaaagctgctcccgacccatgtttttatgaataaatatgctggtttaaaagatgacacaggaccacaaagccagtgatgtggattagtaacagagcagcagtcacatccaaaggaggatgtcacccctgaggaacactgtacaaatgaggtgggatttgtaatcaacaatggaaattaacatgtttttatgaataaataacttatttcttatatggccaaggatgataaaattatttcattctatagttatggtgaataaaacactttatgcagataaagatctgattacatttaaaatagtcaatgtatatgg

SEQ ID NO: 332 - DNA, 1587 bp, Rattus norvegicus
  Genbank Accession No. AB002406
cgcaggttgtggctgcacacactcgtcaaaatgaagattgaggaggtgaagagcaccacgaagacgcaacgcattgcctcccacagccacgtgaaggggctggggctggatgagagcggcctggccaagcaggcggcttcggggctcgtgggccaggagaacgcgagagaggcatgtggtgtcatagtcgaattaatcaaaagcaagaaaatggctggaagagctgtcttgttggcagggcctcctggaactggcaagacagccttggccctggctattgctcaggaactgggcagtaaagtccctttctgcccgatggtgggtagtgaagtatactcaactgagatcaagaagacagaggtgctgatggagaacttccgaagggctattgggctgcggataaaggagactaaggaggtttatgaaggggaggtgacagagctcactccctgtgagacagagaaccccatgggtgggtatggcaaaactatcagccacgtgatcatagggctcaagactgccaaaggaaccaaacagctgaagctggaccccagtatttttgaaagtttgcagaaagaacgagtagaggctggagatgtgatttacattgaagcaaacagtggagctgtgaagaggcaaggcaggtgtgacacctatgccacagagtttgaccttgaggctgaagagtatgtccctttgccaaagggagatgtgcacaagaagaaggaaatcatacaggatgtgaccttgcacgacttggacgtggccaatgcgcggcctcagggtgggcaagatattctgtctatgatgggccagttgatgaagccaaaaaagacagagatcacagataaacttcgaggggagatcaacaaggtggtgaacaaatacattgaccagggcgttgcagagctggtccctggagtgctctttgttgacgaggtccacatgctggatatcgagtgctttacctacctgcaccgagccctggagtcctccatcgcccccattgtcatctttgcatccaaccgaggcaactgtgtcatcaggggcaccgaggacatcacttctccacacggcatcccgttggacctgctggaccgggtgatgatcatcaggaccatgctgtatacgccacaggagatgaagcagatcattaagatccgagcccagacggaaggcatcaacatcagtgaggaggccctaaaccacctcggggagattggcaccaagaccacgctgaggtattcagtgcagctgctgacccctgccaacctgctggccaagatcaacgggaaggacagcattgagaaggagcacgtggaggagatcagcgagctcttctatgacgccaagtcctccgccaagattctggccgaccagcaggacaagtacatgaagtaacgtagggtttggaggtgcacccagaggacagaccccacaccgaggacagggtcttgcgttgagcatgctttgcagtgttacagtttgtttgtaaattatcaaacctccaaggttgtttggaaggaaccctttcccacctagcttgtttttctaataaaactgaatcttattttgatgataaaaaaa

SEQ ID NO: 333 - DNA, 1902 bp, Rattus norvegicus
  Genbank Accession No. AB010635
tagcccgacgaactgagaactggccatggcacggaaacaaccacatagctggctgaatgctgtgctctttgggctcctgcttattcttatccatgtgtggggtcaggactcaccagagtccagctccatcaggaccacacacacgggccaggtccgaggaaagcttgaccacgtgagggacactaaagctggtgtccacaccttcctgggaattccctttgccaaggctcctgtaggaccgctgcgctttgcacctcctgaggaccctgagccatggagtggtgtgagagatgggacctcacatccggccatgtgtctgcaaaatattgatatgctggatgaagtaggcctgacagatatgaaaatgatactgtcttccattcctatgtctgaggactgcctgtatctcaacatctatacaccagcccatgcccatgagggctctaacctgcctgtgatggtgtgcatccacggaggtgcactggttataggaatggcttccatgtgtgatggatctctattggcagtcaatgaggacttggtggttgtcgctatccagtatcgtctgggtgtcctgggctttttcagcactggagatgagcatgccagaggcaactggggatacctggaccaagtggctgccctgcgatgggtccagcagaatatcgcccattttggaggcaaccctaaccgggtcactatttttggcgtgtctgcaggtggcacaagtgtgtcttcacatgttatatcccccatgtctcaagggctcttccatggtgccatcatggagagtggagtggccctgctgcctgaccttatctctgaaacctctgagacggtctccactacagtggccaagctctctggatgtgaggccacggactcagagaccctggtgcgctgcctgagagccaagagtggagcagagattctggtcattaacaaggtcttcaagatgattcccgctgtggtggatggagagttcctacccaggcatcccaaagagctgttggcatctgaggattttcgccctgtccccagcatcattggtgttaacactgatgagtactgttgcaccattcctatggtcatgggcactgctcaaataataaaggagctatccagagagaacctgcaggctgttctaaaggatacagcagcacaaatgatgcttcctcctgagtgtggtgacctgctaatggaagagtacatggggaatactgatgatccccagaccctacaaatacagtacgctgagatgatgggagacttcctgtttgtgatccctgcactccaagttgcacactttcaacgttcccatgcccctgtctacttctatgagttccaacatgcacccagctatttcaagaatgtcaggccaccccacgtgaaggctgaccatgctgatgaggttccttttgtctttgggtccttcttctggggcataaaagttgacttcactgaggaggagaagctgctgagtaggcggatgatgaagtactgggccaattttgcaagacacgggaaccccaacagcgagggtctaccctactggcctgtgttggaccacgacgagcagtacctgcagttggacacccagcctgctgtggaccgagccctgaaggccagaaggctgcagttctggaccaagactctgccccagaagatccaggagctaaatggagctcagaaaaaccatgcagagctgtagtgtctggtgaaaggaacagagtgtgggagtgagggcaggtgggatcattctgagtttcaaagtctaattttctgttccaacacgcagaatcctttccaaccccaatattttccctttctgacatgaatgagaagccctccgtgtgttactctttattcttctgggcaaaatttaattggactcaataaaga

SEQ ID NO: 334 - DNA, 2346 bp, Rattus norvegicus
  Genbank Accession No. AB011679
ctcgcatctctctgcagcagcctccggggctacgttccatcctatcagtctgagaccagcccagaagaaaaaaaccaaaaatccttaattatcttcttttgctcggtacctacattgggaccatcaaaaaaaaattattacagtaaaccgtagccatgagggaaatcgtgcacatccaggccggacagtgtggcaaccagatcggtgctaagttctgggaggtgataagcgatgaacacggcatcgaccccaccggcacctaccacggagacagcgacttgcagctggaccgaatctctgtgtactacaatgaagctacaggtggcaagtatgtccctcgagctatcttagtggatctagaacccgggactatggactccgttcgctcaggtccttttggccagatcttcagaccggacaactttgtttttggtcagtctggggcaggcaacaactgggctaagggtcactacacagagggagctgagctggttgactctgtcttggatgtggtgcggaaggaggcggagagctgtgactgcctgcaaggctttcagctgacccactcgctgggtggaggcacgggctctggcatgggcaccctgctcatcagcaagattcgagaagaataccccgaccgcatcatgaacaccttcagcgtggtgccctcacccaaagtgtctgacaccgtggttgagccctacaacgccaccctgtccgtccaccagttggtagagaacacagatgagacctactgcattgacaacgaggctctctacgacatctgcttccgtacccttaagctcaccacgccaacctacggagacctgaaccatctcgtctctgccaccatgagcggtgtcaccacctgcctccgtttcccgggccagctgaacgccgaccttcggaagctggctgtcaacatggtgcccttcccgcgtctccacttcttcatgcctggctttgcccctctcaccagccgtggaagccagcagtaccgggccctcactgtgcctgaactcacccagcaggtcttcgacgccaagaacatgatggccgcctgtgacccacgccacggccggtacctcacggttgcggctgtcttccgtggacggatgtccatgaaggaggtagatgagcaaatgctcaacgtgcagaataagaatagcagctacttcgtggaatggatccccaacaacgtcaagacggctgtctgtgacatcccaccgcgaggcctcaagatggcagtcaccttcatcggaaacagcacggccatccaggagctcttcaagcgcatctctgagcagtttacggcaatgttccgtcggaaggctttcctccactggtacacgggtgagggcatggacgagatggagttcaccgaagctgagagcaacatgaatgacctcgtctctgagtatcagcagtaccaggacgccaccgcagaagaggaagaggatttcggagaggaggcagaagaagaggcctaaggcggaagccctgcgtcacctcaggctgcttagttcccttagcttttttccaactgccctttgtttctttctgctgcctctgtcctgtttttgttccgttttgttttctcattggggggtaaacggtgcctggcacgtggcaggcgctcaataaatatttctttgtggaatgtctcctttctctttccgatctgacattctgagcgttaaccctgtgcttcctcctggtacccatttctttattatgactgtccagttaatattcttccaatatattctccaggaaccagcgttcggctccagacccggggtagaacccagcccagttctaagaactcaagagagtagccaccatcttaaagcaaagtagcgggtggggaaaaggtgggtagaggagatgctacttagggggtgggattttccagtcagggccatttagacacgggaatcgctggggctttcagtcgatggggctttcttttttccctgcttcatctctcggcctcaggagaggtattaacagtattatcaccatttatatcctagctgtcctgagccaaatctgccattggaggtgtcttcccctgtgttggttctccaagggacgttgtatggggatttgtgggggcagggcagcaaggccttgttctctaaatgtccagaaacactctaattaccatttccacctgggtgcctcacacactccccagaggggaggtaacatctctgccccatttccatcctgttccttggcttggtcattccctacctttctattttctgttaaacttggctttttttttttcatattgaaaagatgacattgccccgagagccaaaaataaatgggaattgg

SEQ ID NO: 335 - DNA, 2225 bp, Rattus norvegicus
  Genbank Accession No. AF020618
ctgcagtacttgtacattgctaaataaagagagggactccaggaggagcagcctgggtctaagaggtaggcagaaggaggttttaggggcctgagcacaagcttgaggagagaaaggttattaaaaagccagacgcttacaggtctcagaagggctagccagaaactgtggctggggttaaggaaagggtttaagagtgtgggcttttggttctgaggatgtagaacgtgaatgttgagagaagaaccaagtggcggagttgggtgtgagcaatgctattaggaatttgaggcagggattcacgcgctgctgtgactattttttaacaatgactcagtgctgtgacctgatactgtttccagagcgacttctaaacaaattccccctttctaggccagacacatggccccaagcccaagaccccagcatgtcctgcactggaaggaagcccactctttctacctcctgtctccactgatgggcttcctcagccgggcctggagccgcctgagggggcccgaggtctcagaggcctggttggcagaaacagtagcaggagcaaaccagatagaggctgatgctctgttgacgcctcccccggtctctgaaaatcacctacctctccgagagactgaaggaaatggaactcctgaatggagtaaagcagcccagaggctctgccttgatgtggaagcccaaagttcccctcctaaaacttggggactttcagatattgatgaacataatgggaagccaggacaagatggccttagagagcaagaagtggagcacacagctggcctgcctacactacagccccttcacctgcaaggggcagataagaaagttggggaggtggtggctagagaagagggtgtgtccgagctggcttaccccacatcacactgggagggtggtccagctgaggatgaagaggatacagaaaccgtgaagaaggctcaccaggcctctgctgcttccatagctccaggatataaacccagcacttctgtgtattgcccaggggaggcagaacatcgagccacggaggaaaaaggaacagacaataaggctgaaccctcaggctcccactccagagtctgggagtaccacactagagagaggcctaagcaggagggagaaactaagccagagcaacacagggcagggcagagtcacccttgtcagaatgcagaggctgaggaaggaggacctgagacttctgtctgttctggcagtgccttcctgaaggcctgggtgtatcgcccaggagaggacacagaggaggaagaagacagtgatttggattcagctgaggaagacacagctcatacctgtaccaccccccatacaagtgccttcctgaaggcctgggtctatcgcccaggagaggacacagaagaggaagatgacggtgattgggattcagctgaggaagacgcgtctcagagctgtaccaccccccatacaagtgccttcctgaaggcctgggtctatcgcccaggagaggacacagaagaggaagacgacagtgagaatgtggccccagttgactcagaaacagttgactcttgccagagtacccagcattgtctaccagtagagaagaccaagggatgtggagaagcagagccccctcccttccagtggccttctatttacctggacagaagccagcaccaccttgggctgcccctaagctgccccttcgactgcagaagcggctcagatctttcaaagcccccgcccggaatcagggccctgagattcctctgaagggtagaaaggtgcacttctctgagaaagttacagtccatttccttgctgtctgggcaggaccagcccaggctgctcgtcgaggcccctgggagcagtttgcacgagatcgaagccgctttgctcgacgcattgccaggcagaggagcagctgggtccttaccttacccctgctttcagggccagagcatggacacgccttagaaacctaccccttcctctgtcgtcctcgtctcttccactgcctgagccttgctcttccactgaggccacacccctcagccaagatgtgaccactccctctccccttcccagtgaaatccctcctcccagcctggacttgggaggaaggcgggctaagcctgagtagttttttgtgtattctatgagtgttagtctcttaatacgaatatgtaacgccttttgcatttgtaaaaaaaaaaaaaaaa

SEQ ID NO: 336 - DNA, 3312 bp, Rattus norvegicus
  Genbank Accession No. AF030050
atggacattcggaaattctttggggttatatcaagtggaaaaaagcctgtaaatgagacagtaaagaagaatgagaagacaaaaccttcggagggaactgtcaaaggaaagaaaggagtaaaggttgccaaggttaataatccctgcaaagaggatgcctccagaccaaagcagcacacagaaaaacgaggatcatctatgactcagattcagaatcagaggagacacgtgcaagtgaaagatgctaaaaagaaatcagaaaaattgccacgtgtgcttgtaaacctggtaaatctctcggaaggatcctcgttacctcatatttctgagacagatgaagacgcagtgactttttatgtaaaaaggcagcctccaaatcaaaagagaatggagtatctacgaaacagttaccttggagcatcaaacgtgaaaaagaatgaagaaaacactaagactaagagtaaaccgttatcaccaataaaactaacaccgacatcagtgcttgattattttggaactgaaagtgtccagagatctgggaagaagatggtggcgagcaaaaagaaagagtcttctcaaaccccagatgattccagattaaatgatgaggccatcgccaagcagctgcagcttgatgaagatgcagagctggagaggcagttgcatgaagatgaagaatttgcaagaacactggccttgttggatgaagaacctaagaccaaaaaggctcgaaaggactctgaagagggagaatcattttcacctgccaaagctgagttaagcaaagcagcaaagcagaagagccctgctaacgagcatttctcaattggaagaaagacctacagtcctgctaagtacggcaagggtagaggctcagaaggcaccaagcagccctgcagatcagctcaccagacggaagcctgctcctctctcaaggccagctccaagctggctcttatgaaagcacaagaagaaaactctcacacagacacagaactgctggctgcaaaaagagaaagtgccattgagcccaaaggagagaaaacaactcctaggaaaacgaaaggctctccaactaaaagagagtctgtaagcccagaagattctgaaaagaagcgcaccaattatcaagcttatcgaagctacttaaatcgagaaggtcccaaagccctgggctccaaagaaatacccaagggagctgaaaactgcttggagggcctgacgttcgtgatcaccggagtgctggagtccatcgaacgagaagaagccaagtctctaattgaacgttatggggggaaagtaacaggaaacgtgagcaagaaaaccagctacctcgtcatgggccgggacagcaggcagtccaagagtgacaaggcagcagctctgggaacaaaaatccttgatgaagacggcctgttggatctgattcgaactatgccgggcaaaaaatccaagtacgaaatcgctgctgaggctgagatgaagaaagaaaagtccaaattggagagaacaccccaaaaaaatgatcagggaaaaagaaaacttagtccaaccaagagggagttggagcctaaaaagagcaagctgactccccttaagcacagccctcggaaggcagtgaaggaggaggaacgtgtgtgtccgaggggcttggacgccaaggagcctcatggcagccacagtgccagcagagaggagtgcctgctctgggtggataagtacaagcccacctcactcaagaacataatcggacagcagggtgaccagagctgtgccaacaaactgctacgctggctcagaaactggcacaagagttctccagaagagaaaaagcatgcaaaatttggcaaagttgccagcaaagatgatggctccagtttcaaggcagcactgctgtctggccctccaggtgttggcaaaaccactacagcttctcttgtgtgtcaggaattgggctacagttatgtggaactaaatgcgagtgatactcggagtaagaacagtctgaaagcaattgttgctgagtcattgaacaacaccagcatcaaaggcttttatacaagtggagcatctccttctgtaagtgcgaggcatgctctcatcatggatgaagttgatggcatggcgggcaatgaggacaggggtggaattcaggagctaataggcctgataaagcatacgaaaattcccatcatttgtatgtgcaatgatagaaatcaccccaaaatccgctcattggttcattattgttttgatcttcgtttccaaagacctcgagttgaacagattaagagtgcaatgctgtctattgcatttaaagagggattaaagatcccacctccagctatgaatgaaataattttgggagctaatcaagatgtcagacaggttttacacaatctcagtatgtggtgtgcacagagtaaggtcctaacctatgaccaagccaaggctgattctcagagggccaagaaggacatcagattgggcccatttgatgtcacccggaaagtgtttgcagctggagaggagactccacacatgtcactgatggacaaatcggatctctttttccatgactattccattgcacccctctttgtccaggagaactacctccatgtaaagcctgtggctgcagggggtgacatgaaaaagcacttgatgcttttaagccgggcagcagatagcatatgtgacggtgacttagtggccaatcagatccggagtaagcaaaactggagtctctcccacacaggccatttacgccagcgttgttcctggagagttgatgaggggctacatgtctcagtttcccagcttcccaaggctggctgggaaagcactcgtctatgggcaagcactgatcggactgttcaggacctgtccttgcacatgagtcttagaacttactccagcaaaaggacagtgaacatggattacctgtcacacatcagagacgcacttgtacgacccttgacctcacaaggagtagaaggggttcagcgtgttgtcacacttatgttggtgaaagaagattttgacaacatcatggaagttagcagcgatacatactattgggggggcaagcccagtaccttttccaagctggaccccaaggtgaaagcagccttcacaagagcctataataaggaggcccacctgaccccatactcacttcaggtggtaaaggcatcgaggcccagcataggtccagcactggattctgagtacaatgaagagtcacaggaagatgccactcagtctgatgagaaagagcaggatgccctagagactgacgccatgatcaag

SEQ ID NO: 337 - DNA, 2539 bp, Rattus norvegicus
  Genbank Accession No. AF035963
cggtgcctgtgagtaaatagatcagggtctccttcacagcacattctccaggaagccgagcaaacattagtgctattttacccaggaggaaatctaggtgtagagagctctacggatctaaggtttggatctgtacccagtgcttttttaggtgtctttagacatttctcaggaagatgtagtctctgtcaccatgtgtggctgaattctagctcagtccatcttattgtgtttaaggtagttgaagtttaggaaccaaccagtatgtctctgagcagaagagtacagtgtccatcttgaggacaagctcatctttaccattagagggctggccttggcttagattctaccgagaacatactctctaatggctgccctcagttttctctgtttgctgtcttatttgtgtcatggccagaagtcatatggatggctctatgtgagcaaggacccagatagaagagtgtatttgggggaacaggttgccctaacagagagtcctgtgggattcatgcagtcaggatgaagacctgatcagacagagtgtgctgagtgccacggctaaccagagtgacttgtcactgtccttcaggtcaacaccatggttcaacttcaagtcttcatttcaggcctcctgctgcttcttccaggctctgtagattcttatgaagtagtgaagggggtggtgggtcaccctgtcacaattccatgtacttactcaacacgtggaggaatcacaacgacatgttggggccgggggcaatgcccatattctagttgtcaaaatatacttatttggaccaatggataccaagtcacctatcggagcagcggtcgatacaacataaaggggcgtatttcagaaggagacgtatccttgacaatagagaactctgttgatagtgatagtggtctgtattgttgccgagtggagattcctggatggttcaacgatcagaaaatgaccttttcattggaagttaaaccagaaattcccacaagtcctccaacaagacccacaactacaagacccacaaccacaaggcccacaactatttcaacaagatccacacatgtaccaacatcaaccagagtctccacctctactccaacaccagaacaaacacagactcacaaaccagaaatcactacattttatgcccatgagacaactgctgaggtgacagaaactccatcatatactcctgcagactggaatggcactgtgacatcctcagaggaggcctggaataatcacactgtaagaatccctttgaggaagccgcagagaaacccgactaagggcttctatgttggcatgtccgttgcagccctgctgctgctgctgcttgcgagcaccgtggttgtcaccaggtacatcattataagaaagaagatgggctctctgagctttgttgccttccatgtctctaagagtagagctttgcagaacgcagcgattgtgcatccccgagctgaagacaacatctacattattgaagatagatctcgaggtgcagaatgagtcccagaggccttctgtggggccttctgcctgggattacagagatcgtgactgatttcacagagtaaaatacccattccagctcctgggagattttgtgttttggttcttccagctgcagtggagagggtaaccctctaccctgtatatgcaaaactcgaggttaacatcatcctaattcttgtatcagcaacacctcagtgtctccactcactgcagcgattctctcaaatgtgaacattttagaagtttgtgtttccttttgtccatgtaatcattggtaatacaagaattttatcttgtttattaaaaccattaatgagaggggaataggaattaaaagctggtgggaagggcctcctgaatttagaagcacttcatgattgtgtttatctcttttattgtaatttgaaatgttacttctatccttcccaaggggcaaaatcatgggagcatggaggttttaattgccctcatagataagtagaagaagagagtctaatgccaccaatagaggtggttatgctttctcacagctctggaaatatgatcatttattatgcagttgatcttaggatgaggatgggtttcttaggaggagaggttaccatggtgagtggaccaggcacacatcaggggaagaaaacaatggatcaagggattgagttcattagagccatttccactccacttctgtcttgatgctcagtgttcctaaactcacccactgagctctgaattaggtgcagggaggagacgtgcagaaacgaaagaggaaagaaaggagagagagcaggacacaggctttctgctgagagaagtcctattgcaggtgtgacagtgtttgggactaccacgggtttccttcagacttctaagtttctaaatcactatcatgtgatcatatttatttttaaaattatttcagaaagacaccacattttcaataataaatcagtttgtcacaattaataaaatattttgtttgctaagaagtaaaaaaaaaaaaaaaaa

SEQ ID NO: 338 - DNA, 1039 bp, Rattus norvegicus
  Genbank Accession No. AF036335
gaaacgcctcctcgttttgctcagcatggcacatttgagtatgaatattctcaacgatggaagtctttggatgaaatggaaaaacagcaaagggaacaagttgaaaaaaacatgaaggatgcaaaagacaagttggaaagtgaaatggaagatgcctaccatgaacaccaagcaaatcttttgcgccaagatctgatgagacgccaggaagaattaaggcgcatggaggaacttcacagtcaagaaatgcagaaacgtaaagaaatgcagttgaggcaagaggaggaacggcgtacaagagaggaagagatgatgattcgccaacgtgagatggaagaacaaatgagacgccaacgagaagaaagctacagcaggatgggctacatggatcccaagagaaagagacatgagaatgggtggtggtggaacaatgaacatgggagatccctatggttcaggaggccagaaatttccaccgctaggtggtggtggtggcataggttatgaagctaatcctggagttccaccagcaaccatgagtggttccatgatgggaagcgacatgcgtactgagcgctttgggcagggaggtgcgggtcctgtgggtggacagggtcctagaggaatggggcctggaacgccagcaggatatggtagagggagagaagagtatgaagggccaaataaaaaaccccgattttagatacttaggctttcattccagtttggttttgtcttcttgtttagataccacttaaattcttggcattttagtaagaaagctacctttttatggatgttagcagtttattgacctgatatttgtaaatggcctgtttgggcaggtaaaattatgtaacgcagtgttcaaaacaggagaaaaattttttcatttactttttttttaactgtataatgtttctcaagttaatggcagtgtaccttgtgccactgaatttccaaagtgtaccattttttttttactgtgcttcaaataaatagaaaaaaatagttatgaacaaaaaaaaaaaaaaaaaaa

SEQ ID NO: 339 - DNA, 538 bp, Rattus norvegicus
  Genbank Accession No. AF038571
gggaagatcatagaagttgaagactgggaaattttctgcaagttgggcctttatatggccactgtcctgagtgggcttgcaatccactccctcgtagtgctgccactgatctatttcatagtcgtgcggaagaaccctttccgctttgccttgggcatggcgcaggctctcctgacagctctcatgatctcatctagctcggcaacccttccagttacattccgctgtgcggaagaaaagaaccacgtggacaagaggatcacaagatttgtgctgcccgtcggcgccaccatcaacatggacggcactgcgctctatgaagccgtggcagctgtgttcattgcgcagctgaacggcatggacctgagcattgggcagatcatcacgatcagcatcacagccaccgctgctagcattggagctgccggtgtgccccaggctggcctggtgaccatggtgatcgtgttgagtgccgtggggctgcctgctgaggacgtcaccctcatcattgccgtcgactggctcctggaccggttca

SEQ ID NO: 340 - DNA, 2381 bp, Rattus norvegicus
  Genbank Accession No. AF038591
gcgaatggcagcctccagaaagccgccgcgagtaagaccacaggatggctccgaaggtgacctcagagcttctgcggcagctgcgacaagctatgaggaactcggagtgcgtggcagaacccatccaggcctacatcatcccatcgggagacgcccaccagagtgagtacattgcaccctgtgactgtcggagggcgttcgtctccggcttcgatggctctgcaggcacagctatcatcacggaggagcatgcggccatgtggacggatgggcgctactttctccaagctgccaagcagatggacaacaactggaccctcatgaagatgggtctgaaggacacaccgactcaggaggactggctggtgagtgtgcttccggaaggatccagggttggtgtggaccctctcatcattcccacagattactggaagaagatggccaaggtacttcgaagtgctggtcaccacctcgtgcctgtgaaggagaaccttgtggataagatctggacagaccggccagagcgcccttgcaagcccctcctcacactgggtctggattatacaggcatctcgtggaaggagaaggttgcagaccttcggttgaaaatggcggagaggagcatcgtgtggtttgtggtcactgccctagacgagattgcatggctgttcaatctccgagggtcagatgtggagcacaacccggtgtttttctcctacgcaatcataggactagagaggatcatgctcttcatcgacggggaccgcattgatgcgcctggtgtgaaacagcacctgctccttgacttgggcctggaggcagaatataaaatccaggtgctgccttacaagtccatcctgagtgaactcaagaccctgtgtgctgacctgtccccgagggagaaggtgtgggtcagtgacaaagccagctatgctgtgagcgaggccatccccaaggatcatcggtgctgtatgccttatacgcccatctgcattgccaaagccgtgaagaactccgccgagtcagcaggcatgaggcgggctcatattaaagatgccgttgccctctgcgagctcttcaactggctggagcaagaggtccccaaaggtggcgtaacggagatctctgcagctgacaaggctgaggaatttcgaagacaacaggctgactttgtggacctgagcttcccaacgatttccagcacgggacccaacggcgccatcattcactacgcgccgatccctgagacgaataggaccctgtccctggatgaggtgtatctcattgactccggtgctcagtacaaggatggaactacagacgttacccggaccatgcacttcgggacccctactgcctatgagaaggagtgtttcacgtatgtactgaaaggccacattgctgtgagcgcggctgttttcccaacgggaaccaaaggccaccttctagactcctttgcccggtcagccctgtgggattccggcctggattacctgcacggaacaggacacggcgtcgggtctttcctgaatgttcacgagggcccttgtggcatcagttataaaacgttctctgacgagcccttggaagccggcatgatcgtcactgatgagccagggtattatgaagatggggcgtttgggatccgcatcgagaacgttgttttggtggtccctgcgaagaccaagtataatttcaataaccgaggaagcctgacctttgaacctctaactttggttcccatccagaccaaaatgatagatgtggatgctcttacagataaagagtgtgactggctcaacagctaccaccagacctgcagggatgtgattgggaaggagctgcagactcaaggccgccaggaagctctcgagtggctcctcagagagacagagcccatctccaggcagcattgataccgtctagcgtttgtttttgtaggatgctctggggaaggaagacacatggcagaccctgacttctttctcctcacctcctcctcctccccaactcccctttttacttttagacactaagaagggcagaaactcttcttatccactttgatattttcttgcaaacagtcttttatgaatttttaattgttgagaatgagccaggaataaaactgctacaccagaaggaggggcctcacaaagcgaagccttgacaagggggagatacccgagccctctggccagcggtggccagcggtgactgctctgcgatggtctccttccaggtgctggtacctcagtcgcggtcaccctgacgttcatgagaccctcctatgatcagtgaataaaatactaaactcggaagagatgagtgcctatggtgtgtacagataaccctctgattttgtgggtttctgagcggcc

SEQ ID NO: 341 - DNA, 1076 bp, Rattus norvegicus
  Genbank Accession No. AF044574
cacacagcaaacatgacccagcagccgcctgacgttgaggaggatgactgtctttctgaataccaccacctcttctgtccggaccttctccaggacaaagtggcttttatcactggtggtggttctgggattggcttccggatcgccgagattttcatgaggcatggctgccacactgtcatcgtcagcaggagtctgccgagagtgtccgaggctgctaagaagttggttgctgccactggaaagcggtgtctccctctgtctatggatgtccgagttcccccagctgtcatggctgctgtggaccaagcgctgaaagaatttggcaaaatcgacatcctcattaactgtgctgcagggaactttttatgccctgccagtgcattgtctttcaatgcctttaagactgtggtggacattgacacccttggcaccttcaatgtgtctcgtgtgctttatgagaagttcttccgggaccatggaggagtgatcgtgaacattaccgccaccctcagtatgcgggggcaggtgctgcagctccatgcaggcgctgccaaggcggctgtggatgctatgacgcgacacttggctgtggagtggggtccccagaatatccgtgtcaacagcctggctcctggtgccatcagcggcactgagggtctgcggagattaggaggccccaaggccagttcgaaatttaagtatctttcaagtcctattccaagactcggaaccaagacagaaatcgcccacagcgtgctgtacctagccagccctctggcttcctatgtctcagggattgtgttggtggttgatggtggtagctggatgacgctcccaaatgacattgggcgactgctagagtttgaatcctcctctgctaagctgtagtgtttgaagagcacacccaaggcttcaagcatgttaaagcaacagaatcaactgaactacgtcctctaccccaagataccttttttgacacataaacattgattgccttaagaaagttgtactgaggaggccgtgttcttccatggggaggcttccctgtctcacatagtctatagtcacacgaa

SEQ ID NO: 342 - DNA, 1416 bp, Rattus norvegicus
  Genbank Accession No. AF054618
atgtggaaagcctctgcaggccatgctgtgtccatcacccaggatgatggggaagccgatgactgggagactgaccctgattttgtgaacgatgtgagtgaaaaggaacagagatggggcgccaaaaccgtgcagggatcggggcaccaggaacacatcaacatacacaagcttcgagagaatgtcttccaagaacaccagacactcaaggagaatgagctggaaacgggacccaaggcttcccatggctatggcgggaagtttggtgtggagcaagataggatggacaaatcagctgtgggccatgagtaccagtcaaagctctccaagcactgctcacaagtggactcagtccggggcttcggaggcaagttcggtgtccagatggacagggtggatcagtctgctgtaggctttgaataccaggggaagacggagaagcacgcctcccagaaagactactccagtggtttcggtggcaaatatggagtgcaagctgaccgtgtagacaagagtgctgtggggtttgactaccagggcaagacggagaagcacgagtcacagaaagattactccaaaggttttggtggcaaatacggaattgacaaggacaaggtggataaaagcgctgtgggctttgagtatcaaggcaaaacagagaagcatgagtcccagaaagactatgtaaaaggctttggaggaaagtttggtgtgcagaaggatcggatggacaagaacgcatccacctttgaagaagtggtccaggtgccgtctgcctatcagaagactgtccccattgaggctgtgaccagcaaaaccagtaatattcgtgctaactttgaaagcctggcaaaggagagagagcaggaggacagacggaaggcagaagccgagagagctcagcggatggcccaagaaaggcaggagcaggaggctcgaaggaagctggaagagcaagccagagccaagaagcagacaccccctgcatcccctagtcctcagccagctgaagacagaccaccatccagccccatctatgaggatacagctccgttgaaggccgagcccagctacggaagtagtgagcctgagcctgagtacagcactgaggctgcaggccttcctgaggccagcaaccagcaaggtctggcctacacatcagagcctgtttacgagaccacagaggttcctggccactaccaagcagaggatgacacctacgatgggtatgagagtgacctgggcatcacagccatcgccctgtatgactaccaggctgctggcgatgatgaaatctcctttgaccctgatgatgtcatcaccaacatagaaatgattgacgatggctggtggcgtggggtgtgcaaaggcagatatgggctcttcccggccaactatgtggagctgcggcagtag

SEQ ID NO: 343 - DNA, 2426 bp, Rattus norvegicus
  Genbank Accession No. AF062389
catcagtgctgttctctctactggtgcttcgggaactctagaactccttcctgagagggaagcaaaccaagctattgccagagagagttccataagagctctgaatatgcattggctgtggaaaattccaagactttgcaccttctggggcactgagatgttccaccgttctttccatatgaatatcaagaaactaatgcccatacagtggggccaccaagaagtccctgccaagttcaacttcgctagtgatgtgatagatcactgggccagcctggagaaggctggcaagagatctccaggtccagccctatggtggatgaatggcagtggggaagaactaaagtggaacttcagagaactgagtgaaatcagtaaacagacggccaatgttctcaccggggcctgtggcctgcagcgtggggaccgtgtagcagtagtgcttcctcgagtcccagagtggtggctggtgaccctcggctgcatgcgttctggtcttgttttcatgcctggaaccacccagatgaaatccacagacatactctacaggctgcaatcatccaaggccagggccattgtggctggggatgaagtggttcaggaagtggatgctgtggcccctgactgctcttttctgaaaatcaagttgctggtgtctgaaaaaaatcgagaaggatggctaaacttcaaggcactgctaaaggatgcatcccccattcatcagtgtgtggagactgtaagccaagaatcagctgccatctatttcactagcgggaccagtggccctcccaagatggcagagcactcccactgcagcctgggcctcaaggccaagatggatgctggctggacaggactgggaccttctgacacaatgtggaccatctcagacacaggctggatattaaacattttagggtcatttctggaaccttgggtattgggaacgtgcatatttgtccatcttttgccaaagtttgatccacaaactgttctaaaggtgctttccagctaccccatcaataccctgctgggtgcccccctcatttaccggatgttgctacaacaggatctttccagttacaagttcccacatctgcatagctgcttcagtggaggagagaccctcctcccggagactctggagagttggaaagccaagacaggactggaaatccgagaaatctatggccagacagaaacgggaattacctgcagagtttctaggacaatgaaagtcaaaccaggctacctgggaacagccattgtcccttatgatgtccaggtcatagatgagcagggcaatgtcctgccccctggcaaggaaggagacatggctctcagggtgaagcccatcaggcctataggcatgttctctggatatgtggacaatcccaagaagacacaggctaatattcgaggagacttttggcttctgggagaccggggaattaaggatacagaagggtatttccacttcatgggacggacagacgatatcattaattccagtgggtaccgaattggaccttccgaggtggagaatgcactgatggaacatcctgccgtggttgaaacagctgtgatcagcagcccagaccctatcagaagagaggtggtgaaggcatttgtggttctagcccctgagttcctgtcccatgaccaagaccagctcaccaaggttcttcaggaacacgtgaagtcagtgacagcaccctacaagtaccccaggaaggtggagtttgtcttagacctgcccaagaccatcacaggaaaaattgagcgagctaaacttcgagccaaggaatggaaaacatcaggataagcccaggcccagtgagactcccaaggctcttgctctgtctttcccaatccttttcttatgactccttagtcttcctatagcaatatgaaattattcatgtagaggcatgtatgtgatttaggtctttgcttggttattgacacagaacaatgacacgtttcatgctaaaagaagaaagaaagagggaataagaggtttgaagtcagaaaaggctaaaacagcaagggaaagaaattgccaattcaagtggtcaggaaggggtagagagaaggggaaagcagaatgaggagagagagagatgagaaggaactggagagaaatagaaaaagggttgtgtagaaggacactagtgtcttcgccaagttgtgtcaatccttagggacatcatgcccaaaggagaaggaaataccacttacagagcatgcccaaggcactgttatacacttgtcatgagtcctatacaggtcatgagccatcttacttcatctgggtgacatctgcaggctcatcttctgcaccccaaaatgtaccacttcctgtagctcacattttttgttctagctttatttccttgaattaataataaaatcacttcaaaatc

SEQ ID NO: 344 - DNA, 1607 bp, Rattus norvegicus
  Genbank Accession No. AF062594
  misc_feature (1)..(1607): n = a or c or g or t
catgctgaaatatcgcggtttaccatatggggatggtggcgacaatctcctggagcccgtcagatcgcggaaattaccgatgcctgcgcagctccttccgctcagctccgcgtccgagcctcctggaacgatatttggagttcttaaaagatggcagacattgacaacaaagaacagtctgaacttgatcaagatttggaagatgttgaagaagtagaagaagaagaaacgggtgaagaaacaaaaatcaaagcacgtcagctaactgttcagatgatgcaaaatcctcagattcttgcagctcttcaggaaagacttgatggtctggtagacacaccaacaggatacattgaaagcttgcctaaggtagtcaaaagacgggtgaatgctctcaagaatcttcaagttaaatgtgcacagatagaagccaaattctatgaggaagttcatgaccttgagagaaagtatgctgttctctatcagcctctgtttgataagcgatttgagatcattaatgcaatttatgaacctacagaagaagaatgtgaatggaaaccagatgaggaagatgaagtttcggaggagctgaaagaaaaggccaagattgaagatgagaaaaaggatgaagaaaaagaagaccctaaaggaattcctgagttttggttgacagtttttaagaatgatttgctcagtgatatggttcaggaacatgacgaacctattctgaagcacttgaaagatattaaagtgaagttttcggacgctggccagcctatgagttttatcttagaatttcactttgaacccaacgaatatttcacaaatgaagtgttaacaaagacttacaggatgaggtcagaaccagatgattctgatcccttttcttttgatggaccagaaattatgggttgtacagggtgccagatagattggaaaaaaggaaagaatgttactttgaaaaccattaagaagaagcagaaacacaagggccgtgggacagttcgtactgtgactaaaacagtttccaagacttctttctttaacttttttgctcctcctgaagttcctgagaatggagatctggatgacgatgntgaggcaatactggctgcagactttgaaattggtcactttttacgtgagcgtataatcccaagatcagtgttatacttcactggagaagctattgaggacgatgacgatgactatgatgaagaaggtgaagaagctgatgaggaaggggaagaagaaggagatgaggaaaacgatccagactatgacccaaagaaggatcaaaacccagccgagtgcaagcagcagtgagcagtgactggccttgaggacggcctccctgtaatagcctaaacatgactcacttacttacagccttatggttttgtattttcttgatagaatcagtaagtttctaagggaaaggaaattgatattttgcagaccaatttgttctaaccagcatcccaactctagctctgtagccacgttaccgagtccagccctttactgcatgctcaggtcgctgcagtctggttctcctgagagatttcatcatgtagctattggtacattatgaaaccactgtgaacaat

SEQ ID NO: 345 - DNA, 1750 bp, Rattus norvegicus
  Genbank Accession No. AF062741
tggtgaggagaggacgaggatactagaatgtcaagtactgcgtcctaccggatcttcaattttgcaaggaatcgtattgctgtattacgagggggtagacgcttgtactccagggcagccacgagtaggaatcaagtgaaatggaggctcttttctcccgcatcattggccgtgaacgacagttctccacatggtggctttgctctgcggaaagcttacagacacacatcaaccgaggaagaggatttccacttgcagctcagccccgaacaggtcagtgacctgctccgagctggcgagtcatcccacaaggttctggatttcaacagcggagttccaaattcagtgttaaggtttgagagcaaccagttggcggccaattccccagtggaagaccgacaaggtgtggcttcctgcgtgcagacgagggggacggtgtttggtatttttgatgggcatggtggccatgcgtgtgcacaggcggtgagcgagaggcttttctattacatggcggtgtccctcatgtcccataagaccttggagcagatggaggaagccatggagaacatgaagcctttgctgcccatcctgcagtggctcaagcaccccggagacagtatttataaagatatcacatcggttcatctggaccacctccgagtctattggcaggaactccttgacctacatatggaaacgggactaagcactgaagaggcattgatgtactccttccagagactggactccgacatctcgctagaaattcaggctcctctggaagatgaggtaacgaagaacttatccctccaggttgctttttctggggcgacagcctgcatggcccacgtcgacggagttcacctgcacatagcaaatgctggcgactgccgagctatcctgggtgtccagggagacaatggagcgtggtcatgtttacctcttacctgtgaccacaatgcctggaatgaggcagagctgtcccggcttaagagagaacaccccgagtctgaggacaggacactcatcatagatgacaggctgctgggtgtcctcctaccctgcagggccttcggggacgtccagctaaaatggagtaaagagttgcagcggaacgtcctagagaggggatttgataccgaggccctcaacatctaccagtttaccccgccccactaccacactccaccctacctgactgctaagcctgaggtcacataccacaggcttaggccccaagataagttcctcgtgctggcctcagatggcctctgggacatgctggacaatgaggatgtggtaaggctggtggtggggcacctgtccaaggtcggtcaccagaagccagccctggatcaaagaccagccaacctgggccacatgcagagtctgctgctgcagaggaaagccagcggactccatgcagctgaccagaatgcagccacacatctgatcagacatgccatcgggagcaacgagtatggggaaatggagccagagcgtctggctgccatgttgacgctgccagaggatgtggccaggatgtaccgggatgacatcactgtcatggtggtgttttttaactcagaatcaattgatacctattttaaggagggttaagagtctcaccctgttgccaaggctaactcgaatgccctttatttagaacatttccactcattccttagtgagcaatccaaaccttagtaaagaacaggcagacataggttgctgagtaattccggaattc

SEQ ID NO: 346 - DNA, 672 bp, Rattus norvegicus
  Genbank Accession No. AF073839
cccggagtgttggtgattcggagctgctgtgtctgtccgagatggcagaggtggaggaaacactcaagaggcttcagagccagaaaggagtgcagggcatcatcgtggtgaacacagaaggcattcccatcaagagcacaatggacaatcccaccacgacacagtacgccaacctcatgcacaacttcatcttaaaggctcggagcactgtgcgtgagattgacccccagaatgacctaaccttccttcgaattcgctccaagaaaaatgaaattatggtggcaccagataaagactatttcctgattgtgattcagaatccaactgaataaggcactgtcttggcttcctgtgtcattccttaatttaacgtcccccgagaataatagcgttaatcatgtcagtgggcacatgtggctgcctggagccatgcagaccttggcattggtgaagggcagctctgcccaccccaccaaggagtgcctctgatgatccggtcagtccccagaagagctcagttctctctccaggctttggaatgagagctcttgatgagcccacagccagcttccttctaaccttcatttcactttgtcccccttggaagctgtttttgtttttttaaactaaaaataacttcaaccccaaaaaaaaaagaaaaaaaaaaaaaaa

SEQ ID NO: 347 - DNA, 7420 bp, Rattus norvegicus
  Genbank Accession No. AF084186
atggatccaagtggggtcaaagtgctggaaacagccgaggacatccaggagagacgacagcaggttctggatcggtaccaccgcttcaaggagctctctaccttgcggcggcagaaactggaggattcctatcgcttccagttttttcagagagatgctgaggagctggagaagtggattcaggagaagcttcaagttgcctctgatgagaactacaaagaccccaccaacttgcagggaaagctccagaaacaccaagcctttgaagctgaagtacaggccaactcaggagccattgtgaagctggatgagacaggaaacttgatgatttctgaagggcactttgcatctgagaccatccggacacgtttaatggagctgcaccgccagtgggagttgcttttggagaagatgcgggagaaaggaatcaaactgctgcaggcacagaagctggtgcagtatttgcgggagtgtgaggatgtaatggactggatcaatgacaaggaagcaattgtgacgtctgaggagctgggccaggatttggagcatgtagaggtactacagaagaagtttgaagagtttcaaactgatctggctgctcatgaagaaagagttaatgaagtaaaccagtttgctgccaaacttatccaggagcagcacccggaagaggagctgatcaagaccaagcaggaggaggtgaatgcagcttggcagcgactgaaaggcctggctcttcaaaggcaggggaagctctttggtgctgccgaggttcagcgctttaacagggatgtagatgagaccattggttggattaaggagaaagagcagttaatggcctctgatgactttggcagagacttagcaagtgttcaagctctgcttcggaagcatgagggtctggagagagatcttgctgctctagaggacaaggtgaaagccctgtgtgccgaggctgaccgcctgcaacagtcacaccctctgagtgccaaccagatccaggtgaagcgagaggaactaattaccaactgggagcagatccgaactctggccgcagagagacatgcacggcttgatgactcatacaggcttcagcgctttcttgctgacttccgtgacctcacgagctgggtgactgaaatgaaagccctcatcaatgcagacgagcttgccaatgacgtggctggtgctgaggccctgctggacaggcatcaagagcacaagggtgaaatcgatgctcatgaagatagctttaagtctgcagatgagtctgggcaggccctactcgctgctggtcactatgcctcagatgaagtgagggagaagctgagcatcctctctgaggagagagctgccctgctggagctgtgggagcttcggaggcagcagtatgagcagtgcatggacttgcagctcttctaccgagacactgagcaggtggacaactggatgagcaaacaggaggcattcctgctaaatgaagatttgggtgactccttagacagtgtggaagctcttttgaagaagcatgaggactttgagaaatctctcagtgcccaggaagaaaaaatcacagcacttgatgagtttgcaaccaagcttattcagaacaaccactacgcaatggaagatgtagccactcgacgagatgctctcctgagccgccgcaatgccctccatgagcgagccatgcatcgccgggcacagctggccgattccttccacctgcagcagttcttccgcgattccgatgagctcaaaagttgggtcaatgagaagatgaaaacggccactgatgaagcttacaaagatccgtccaacctgcaagggaaagtccaaaagcaccaggcttttgaggctgagctctcagccaaccagagccgtattgatgccctagagaaagctgggcaaaaactaatagatgtgaaccactatgccaaggaagaagtagcagctcggatgaatgaggtcatcagtttgtggaagaaacttctagaggccacagaactgaaaggagtcaagctccgagaagccaaccagcagcaacaatttaatcgcaatgttgaggacattgagttgtggctgtatgaagttgaaggtcacttggcttcagatgattatggtaaagacctcactaatgtccagaacctccagaagaagcatgctctgctagaggcagatgttgctgctcaccaggatcgaattgacggcatcacaattcaggcccgccagttccaagatgctggccatttcgatgccgaaaacattaaaaagaagcaagaggcccttgtagctcgctatgaggctctcaaggaacccatggtggcccggaagcagaagctggcagattctcttcgtctgcagcagctcttccgagatgtggaggatgaggaaacctggattcgagaaaaggagcctattgctgcgtccactaacagaggcaaagatcttattggagtccagaatctgctaaagaagcaccaagctttacaggcagaaattgctggccatgaacctcgcatcaaagcagtgacacaaaagggcaatgccatggtggaggaaggccattttgctgctgaggatgtgaaggccaaactgagtgagctcaaccagaagtgggaggcactgaaagccaaagcctcccagcggaggcaggatctggaggactcactacaggcccagcagtactttgccgacgccaatgaagctgagtcctggatgcgggagaaggagcccattgtgggcagtaccgactatgggaaggatgaagactctgctgaggctctgctcaagaagcatgaagctttgatgtccgatctcagtgcctacggcagcagcattcaagctttgcgagagcaggctcagtcatgccggcaacaagtggcccccatggatgatgagactggcaaggagctggtcttggctctctatgactatcaagagaagagccctcgtgaggtcaccatgaagaaaggggatatcctcaccttgctcaacagcacaaacaaggactggtggaaagtggaagtgaatgaccgtcagggttttgtgccagctgcgtatgtgaagaagctggaccccgcccagtcagcctcaagggagaacctcctggaagaacagggcagcattgctctgcggcaggggcagatcgacaaccagacacgcataactaaggaggccggcagtgtatctctgcgtatgaaacaggtggaagaactgtatcagtctctgctggagctgggtgagaagagaaaaggcatgttggagaagagttgcaagaagttcatgttgttccgggaagcgaacgagctacagcagtggatcaacgagaaggaagctgctctaacgagtgaagaggttggcgctgacttggagcaggtcgaggtgctgcagaagaagttcgatgacttccagaaggatctgaaagccaatgagtcccggctgaaggacattaacaaagtggccgaggacctggagtctgaaggtctcatggcggaagaagtgcaggccgtgcagcagcaggaggtgtatggtatgatgcccagggatgaagcagattccaagaccgcctccccatggaagtctgctcgactgatggtccacacagtggccaccttcaactccatcaaggagctgaatgagcgctggcggtccctgcaacagctggctgaggaacgtagccagctcctgggcagtgcacacgaagtacagaggttccacagggatgcggatgaaaccaaagaatggattgaggagaagaaccaggctctgaacacagacaactatggccatgatctagctagcgtccaggccctgcagcgcaaacacgaaggcttcgagagggaccttgcagctcttggtgacaaggtgaattcccttggggaaacagcccagaggctgatccagtcccaccctgaatctgcagaggacttaaaggaaaagtgcacagagttaaaccaggcctggaccagcctagggaagcgtgcagaccagcgcaaggccaaactgggtgactcccatgacctgcagcgcttccttagcgatttccgggacctcatgtcttggatcaatggaatacgagggttggtatcttcagatgaactggccaaggatgtcactggagctgaggctttgctggagcgacaccaggaacaccggacagaaattgatgccagggctggcactttccaggcatttgagcagtttgggcagcagctgttggctcatgggcactatgccagcccagagatcaaggagaaacttgatattcttgaccaggagcgcacagacctggagaaggcctgggttcagcgcagaatgatgctggaccactgcctggagttgcagctgttccatcgagactgtgagcaagcagagaactggatggctgcccgggaagccttcctaaacacagaagacaaaggagactcgctggacagtgtggaggctctgatcaaaaaacatgaagacttcgacaaagctatcaatgtccaggaggagaagatagctgccctgcaggcctttgccgaccagctcattgctgtggaccactatgccaagggagacattgcaaaccgacgcaatgaggtcctggacaggtggcgccgcctaaaagcccagatgattgagaaaaggtcaaagctcggagaatctcaaacacttcagcagttcagccgggatgtagatgagattgaagcctggatcagtgagaagttacaaacagccagcgatgagtcatacaaggaccccaccaacatccagagcaagcaccagaagcaccaagcctttgaggcagaactgcacgccaatgctgaccgaatccgtggagttattgacatgggcaactccctcattgagcgtggggcctgtgctggcagtgaggatgctgtcaaggcccgcctggctgcccttgcagaccagtggcagttcctggtgcagaagtcagctgagaagagccagaagctgaaagaggccaataagcagcagaacttcaacaccgggatcaaagactttgacttctggctttctgaggtggaggctctcctggcatctgaagactacggcaaagacctggcttccgtgaacaacctgctcaaaaagcatcagctgctggaggcagacatatcggcccacgaggatcgtctgaaggacctgaacagccaggctgacagcctgatgactagcagtgccttcgacacctcccaagtgaaagagaagcgggacaccatcaatggacgctttcagaagatcaagagcatggcaacctcccgaagagcaaaactgagcgagtcccatcgcctgcaccagtttttccgagacatggatgacgaggagtcctggatcaaggagaagaagttgttagtgagctctgaggactatggcagagacctcactggtgttcaaaatctgaggaagaaacacaagcggctagaagccgaactggccgcacacgaaccagccattcagggtgtcctggacacggggaagaagctgtctgatgacaacaccatcgggcaggaggagatccagcagcgtctcgcacagtttgtggagcactggaaggaactgaaacagctagcagctgcacggggccagcggctggaggagtccttggagtatcagcagtttgtggccaacgtggaggaggaggaggcttggatcaatgagaagatgaccctggtggccagcgaagactacggggacactcttgctgccatccagggcttactgaagaaacatgaagcttttgagacagacttcactgtccacaaggatcgagtgaatgatgtctgtactaatggacaagacctcattaagaagaacaatcaccatgaggagaacatctcttcaaagatgaagggtctgaatggtaaagtgtctgacctggagaaagcagcagctcagaggaaagcgaagctggatgagaactcggccttccttcagttcaattggaaggctgacgtggtggagtcctggattggtgaaaaggagaacagcttgaaaacagatgattatggccgagatctgtcttctgtccaaactctgctcaccaagcaggagacatttgatgctggcctgcaggccttccagcaggagggcattgccaatatcactgccctcaaagaccagctgctagctgccaagcacattcagtcgaaggccatcgaggcccgacatgcctccctcatgaagaggtggacccagctgttggccaattcagctacccgcaagaagaagttgctagaggcccagagtcatttccgaaaggtagaagacctcttcctgacctttgccaaaaaggcatcggctttcaacagctggtttgagaatgcagaagaggacctcacagacccagtgcgctgcaactctctggaagaaatcaaagccctccgagaggctcatgatgccttccgctcatcgctcagctctgcgcaggccgacttcaaccagctagccgagctggaccgtcagatcaagagtttccgagtggcctccaatccctacacctggttcaccatggaggccctggaagagacgtggaggaacctacagaagatcattaaggagcgagaactggagctgcagaaggaacagcggcggcaggaggagaatgacaagctacgccaagagtttgcccagcatgccaacgcgttccaccagtggatccaggaaacaagaacgtatctcctcgacgggtcctgcatggtcgaagagtcgggaactctggaatctcagcttgaagctaccaaacgcaagcaccaggagattcgggccatgagaagtcagctgaagaagattgaggacctgggggctgccatggaggaagccctcatcctggacaacaagtacactgagcacagcactgtgggcctggcccagcagtgggaccagttagaccagctgggcatgcgcatgcagcacaacctggagcagcagatccaggccaggaacacaacaggagtcactgaggaggccctcaaggagttcagcatgatgttcaaacacttcgacaaggacaagtctggccggctgaatcatcaagagttcaaatcctgccttcgttctctgggttacgacctgccaatggttgaggaaggagagcctgatcctgagtttgaggccatactggacactgttgatcccaacagggacggccacgtctccctgcaagagtacatggctttcatgatcagccgtgaaaccgagaatgtcaagtccagtgaagagatcgagagtgctttccgggccctcagctccgagggcaagccttatgtgaccaaggaggagctctaccagaacctgacccgggaacaagctgactactgtgtctcccacatgaagccctatgtggatggcaagggccgcgaacttccaactgccttcgactacgtggagttcacccgctctctctttgtgaattgat

SEQ ID NO: 348 - DNA, 1330 bp, Rattus norvegicus
  Genbank Accession No. AF095741
gggttagtttaacatgggttcctccagctccaccgctctggctcgccttggactccccgggcagccgcggtccacctggctcggcgtcgccgcgctgggactggccgcagtggcgctggggaccgtggcctggcgtcgcgcgcgtccccggcggcgccggcagctgcagcaagtgggcacggtgtcgaaggtttggatctacccgatcaagtcctgcaagggggtgtcggtgtgcgagactgagtgcaccgacatggggctgcgctgcggcaaagtgcgcgacaggttttggatggtggttaaggaagatggtcacatgatcactgcccgccaggagcctcgccttgtgctggtcaccatcaccttggagaacaattacctgatgctcgaagctccaggcatggagccgatagttctgcctatcaagctgccctcttcgaataagatccacgactgcaggttgtttggcctcgacattaaaggcagggattgtggcgatgaggtggcccggtggttcaccagctacctaaagacgcaagcctacaggttggttcagtttgataccaaaatgaaaggaaggacaacaaagaaactctacccgtcggagagctaccttcagaactatgaggtcgcctacccagactgcagccctatccacctgatttctgaagcctccttagtggatctcaacaccaggctgcagaagaaagtgaagatggagtatttcaggccgaacatcgtggtgtcaggctgcgaggctttcgaggaggacacctgggatgagctcttgattggtgacgtagagatgaagagggtgttgagctgccccaggtgcgtgttgactacagtggacccagacaccggcatcatagacaggaaagagccgctggagaccctgaagagctatcgcctgtgtgatccttctgtgaagagtttataccagtcgtctccactctttgggatgtatttctcagtggaaaaaattggaagcctgagagtgggtgaccctgtgtatcggatggtggattagtggatcccgtggactgactcggtttggattattcacaactgacagtctgagtaacagagtgatggggaatcttgtcatttactcggcttccctgggagacgacgcatctgcaagtcctcacggccatcttcctggaaatggatctctgttcttcctctggagctgcacatgcccgagttcattcaagaaagctaccagaggtggtttgggaatgtgacggtgtataaattttagataatgaggttttaaaaaattaaacggaattgttactcccacggttaaaaaaaaaaaaaaaaaaaa

SEQ ID NO: 349 - DNA, 560 bp, Rattus norvegicus
  Genbank Accession No. AI007622
cacataaaggggtaagaattggtacaaatcatagacattgtttaaatacaaataaataattctagattctaaagaaacaactctagataatcctaaagtattctctaggttcctattaaaaatagaaggctattggcatcaaattctactccacctacaaccctttgagaacttaaggatgaaatggtgaattctatattctaagaagtcaccagacaaatgggagccggtgttcccacttccctgaacgagctcccaagtggaagagtttcctgtatcacagatatacacaactgataaatctgggacttattcagtatctaaagatagctaaaaaagactggccttgggaaaagcagtaagaattcctctgaagcagttctgtggattctgaaaccccagaggtcaagcgtcttaaccccaggaagacttgagcctctgcaacccaagtcatcatgggtggcacctgcggtgagcagcagtgatctgctcagtgaagaatggtgctgctaatgaaacagtctgtcaggcctggcaacaaagcagtcaagcctgagctg

SEQ ID NO: 350 - DNA, 480 bp, Rattus norvegicus
  Genbank Accession No. AI007725
gaaatcacaaacagtaagaaactttattggttttttttcctgtgtcaataaagtgtaccaattttaaggaacagtactgcgagtgcctgtccccctaaagccgtgcacaatacacacaaaataaaaataatcaaacaaagaaaatgaaatcatttacacataattaattaagaaccctgaacatccagaatcagattttccctacagcatgaagactgagaaggcaaacaaaccagaaagcttgaacttgaaactgaccaatagcaagtagttttggggaagttctctgtgaaaattcactacagaattactgacatgcgaaaaatggcttaaaaacaaaacagaacagaacagaacgaaaaccagtgcaaaatcttcctaaggtttttaaccatatatatcctttgactatatttactggttatttctagtctagctttccacttttaaaatctaaaattaagattaaaacaatcaaaa

SEQ ID NO: 351 - DNA, 569 bp, Rattus norvegicus
  Genbank Accession No. AI007824
cctcactatagggaataagcttgcggacgctaaagttttttttttttttttttttttttttttttagtattactttgacttgtgagtctaggttaaaatcattcggaggattttttattctccgaggtcaccccaaccgaaattttttagttcatatttattttgttttagcccattaggttgtttttatataagttgaactagtaaattgaagctccatagggtcttctcgtcttattgggagattccagcctcttcactggaaggtcaatttcactgattgaaagtaagagacagttgaaccctcgtttagccattcattctagtccctaattaaggaacaagtgattatgctacctttgcacggtcaggataccgcggccgtttaactttagtcactgggcaggcaatgcctctaatacttgttatgctagaggtgatgtttttggtaaacaggcggggttcgtgtttgccgagttccttttactttttttaatctttccttaaagcacgcctgtgttgggctaacgagttagggataagtaattttattgttgggttagtaccta

SEQ ID NO: 352 - DNA, 635 bp, Rattus norvegicus
  Genbank Accession No. AI007877
gctccaaaagtaatagttaaaattaccagtgggtaaattatcttacacttactaaactaacattatatgttttacaattttgaacaactttacaagttactgttattttcaattctgagtagaaaggtaaactccaagcaagacaaagccaatagaggcttaagttcatcaccaacaagtttcaacaatttaccccaaatttactgttaaacagtacctggttgaagacacaagctgcgccttaaataagctggagcgactctgggatgttatgaacttaaccttgaaaggaagaaggtataggaacttctatttggtttggattgtaagaacagacaaattacttacagaaactgaattacttcaatacacatgtgaagacatagaagaaaacaataaaaatttacaatccaatcaggatataaacatcttttatatcatagaagttgtcaattatctatgcacatatagttagattttagcagtaaccaaacagttgcttataagttcaacaaaattacagatgtttttcagcatttcatagccacatcgttgggaatgggttgttgagcttcctttcactttaatgagtatctgggataagcaacttataaagacaaaagctttattttagc

SEQ ID NO: 353 - DNA, 496 bp, Rattus norvegicus
  Genbank Accession No. AI008160
  misc_feature (1)..(496): n = a or c or g or t
aaaagcaaaatgagaactttattgatctgaaactaaagggaggctctccatttcttggcaggacttgcgatggaaaatattttcccatctttctctagtttcctcaagtgaagcaagagattatgctccgccatcttatgtaaattctctggaacgttcttgtaaatcattttcctaagttcgctcactgagaatgattcctcaaggttatcacggaatacggtgataatttgttcttctcggttatttcggtgagaaatatattccagaattttagcttcggcattatggatcactgggccatgtcctggatatataatgttggctttgacttttagtaagtcttttagggagttcatgtaatcagagaggtcttcaaatatcgttgtcccttctcctaggatgcagtcnccagaaaagatggcattttcctcttccaggagtaaagccatgtgatcatcagtgtggccaggagtgtataagactctgagcgtgg

SEQ ID NO: 354 - DNA, 485 bp, Rattus norvegicus
  Genbank Accession No. AI008183
gagaaagggttttactatggagccaggctggccttgaactcacagcagtcctctagctccagcctcttgaatgctgggattacaggtgtgagccaccatgctgggctgtgtctggaatgtctccttgaacaagatgtgcaaggatgtgtctgagagaaagacagtctgagtgggctctgctgtacatcaagcaaaacaccaaccccttgcttaacgccatgagacctcggctcaccctgtccaggtcccagggacccaaaccacactcactcacacagaacccacatccttgccgcccctcctagataaagtgctcaagcaaggccgcacaggctgagcccagcatcaaacccagtgacatgtagaacagcatcaccacactggtggcctcagccagctcccggggcacaatcttgggcccatacatgagcaccagcgtgctgaggtagccattactgagccccaagaggcaggtgaagagtata

SEQ ID NO: 355 - DNA, 428 bp, Rattus norvegicus
  Genbank Accession No. AI008441
  misc_feature (1)..(428): n = a or c or g or t
gccaagccagcctaaaaagtttattacaggtgtgtgatcgggcggatgtcacgtgaacatccaagtgtgccagtaagaaaagacccaagagagcctctgcccacccactccttggctcctcacctccccagacttactcattaccctaagttaacgtgtcctgtttcagttggagtcttaggaaatcaaatcaaatcaatccccaatagtgcagacctttctaccaggcgcaccagaggagtgaagagtgtccccacacactcctactgggtgtaggacatcagaacccacactcatgatccacggtccggctgtacaaccccacccacccctctgtgtgcggggagcagcaggctctctgacccacatggcacagctcagtcagggagcgggccatcacgcagtggagcacaaggtcagttcctgng

SEQ ID NO: 356 - DNA, 505 bp, Rattus norvegicus
  Genbank Accession No. AI008458
tatttttttttttttttttttttcaattccatcaaatttattatagactttgaaagttggcggttcacctgcttggtgtacagaagacagactctaagaaaggatctggaggcaccgcctcttctgtcaattgtaatgtatttggcaaaagtgaagactttgtaaacaccaactccatggctcaaagcagactttctccacagcacagttcaaaagccaggagaatgccaataagttagaccatgctcaacctgccagccaccacctgcggcctagagtgtggccctgctgttcccaaatcagacagacaacaaaacaacccaaacagaccagttcaaccaacagccctggatggagttctcagggcaggagatgggcaacctggggtccaccctaagcctatgcagtgtagttgtgtgggaagtgcaccatgcagaacttggctgtagttggtgttggtctttttgattttcctatattcctgaagaatctgtccgcgggttgc

SEQ ID NO: 357 - DNA, 328 bp, Rattus norvegicus
  Genbank Accession No. AI008578
ctgcctccgctgctgtctgtcccagtcatggttgagattcctgtctcccagaagcctcctacagcctgtactggctgctttgaggatggcctggcagatgaagacgctgtgtgaaagtttctggcctgagacatgcagagctcagctaagaaaagctgtttcagtcactctttcacaaccttacccccccccacacacacacacacaaaggagcaagaggagccagcgaagccaagaggctcagtcctgacagagaagagaccaaaagctcaccctgtaatctttatcctgtggcaagaaagtgtcctccttaggaagagggacacag

SEQ ID NO: 358 - DNA, 632 bp, Rattus norvegicus
  Genbank Accession No. AI008974
  misc_feature (1)..(632): n = a or c or g or t
cctgtcagccgacagtttattgaaaggaaatcttgctttatccatgaagtcacttccatggaggtagctgtgataaagtgtctcttccccatgacaacgcatagcgaccaatccctactgaaagacctgcccgagtacaccaactgtcctggtggaatgacactctggagcaggaaaaacaaatttctaaaaggcatacagtgattgtcttctgagctttgcagctggcaacatgtatgttttcacacaagatatttttaagctagcgaaagaaaatactcaagcaggattagttcttaaagcaataaacaggggaataaaaacatcatgtatatataagaaaaccaaggcatgctcacaggtttgagccaagaaagacctggagccctaatccccaccttgtcccaggatgcacctgtcatgatcacagggaagagatgagtctgggatttacaaacctctctctaaacctcagtccagtgttgtgccgctggctgtaccacacacaccgnacaagccccgactgctcccattccattacggcacaggagacatgttctcaccctgcctagcctgctttggtggngggaggcggcggcagggaactctacaagtgtttccagtggtgacct

SEQ ID NO: 359 - DNA, 587 bp, Rattus norvegicus
  Genbank Accession No. AI009167
cagcgaaatggattcttttaatcactgaagacagtacaaactgatacaacttataaaaatttagaaatatgtttctaggccatgaaaatgtctatatcctttggcccgatgaacccattcatggaattttaaacaaagaagaccaagaacagtaaagctcaaccgacataggtatgttgtagtcatagcgacagatcgaaaccaccagctgtccagagaagtggtcgggtgagtgctcctgccacacatgtgggctcaaggcagtcagcactggagggatgccgggcagggtacagggtgggggcggagcttcacagtggtaaaacgaaggcgggctcctcgcatgttgtcatgcttccacacacagctagaaatacatgttacaagatgcatagagaaacagatgcccaaaacgtggagaacatgcagggtgaagttctgatgcgtttatccttctaggcacactgtgtggcgtaactgcacccctccagggactgggtgctgtcctcacactgtggggtgagttcactgccccagggactgggtgctctgttcgcactggtgtgagtgcagtgctccagcgttgg

SEQ ID NO: 360 - DNA, 437 bp, Rattus norvegicus
  Genbank Accession No. AI009362
gaaaggaaaactaacatttattgagcgcctatgggtatgtgtatatatgtgtatacatacatacacacccttatacaatgtatgcctggtcttgtgcaaggagttctcatctacaacattccgtttgatcctcaccccaaccctgtgaggtaggtattatcctcacgtgtcaggtgaggactacgaggctcaaaaaggttaggtagtttgttcagggacactgaactagagaccagtgagctgagactgagttttaagtctccggcagttctatcctatcccggttctttcctacccccttgagccctgtagcccatggctccccaaaaagaagcctgccccatcctgctctgcaaggatgcagtcagttgaggattaagacataaataaaataaatagcagggtcaggttcccaaaagtgaggacgtttccatact

SEQ ID NO: 361 - DNA, 597 bp, Rattus norvegicus
  Genbank Accession No. AI009602
gacatacaaaaagacaatatttattttacttctgtataagtagttcaacagaaagcctcctagttgaagacattactgaaaacattaacattattgtatgccatcccttcagtgcccagattcagaaacatcatctgaatgaaaggaaaggaatgtaggaatgtccgctttatgttggatttacgtatgtaagtggggaaaaatctatataccttcgtcaatatatgaacttacaagttaccaataagcaatgtactgatatcatgaagagttcttaaggcctggagattacttttgtctgttaaaacaaaggtactcctatttgctgtctgtccccttcccccctgctactgtacttctgaatgagaatttgaagcaaaataggatgtctttgtttccatgctgtaagactgtcagcattgacggtttccagagcatttcaaaacatgctcttcagctccatcaacacaggccagtagtaaacaatggctctgtacaaggcatttacgatgctttccttctcagaactatgataccccggggaaggagtatttcacacttatgcaagaaagcgaagtcttgtttctactgactaat

SEQ ID NO: 362 - DNA, 597 bp, Rattus norvegicus
  Genbank Accession No. AI009614
aaaaaggaaatgtttattgttgtgttacaaggtgattataaactcctctaaaaaaagcaaagatggatttaaaatatcaatatacatattcatctaaaaagcaaaagagaaaaaaaaaaaccgaaaccctgcaaaatgcggggtcgccgtaattaaacatacacagagcttgtatactgcaagacaggtcacacaccaaggatccttcaaacacaaacgctcctccccttcttggttggtttcaggtttttgtgtgtgtggtttgggacttgatgaaggaggggtgtgcacacagaggtatttacagtgtccatagggacaggggtatcaggttccagtgggactgtgaggggccttctctaaggtgccttcctggcttacgtctgcatcttggagagagaaactgggctggcacctgttcgactgcttgctagagcattgccccgtccagaggggcggggctggaatgctgtcggccatggtagtgacaccctgtgatagagaaagccccttcctgtgcggagggggcacatgctgctttctcctcatgctttgccatggtctgcatagctttcctctcatgctacttcctgcata

SEQ ID NO: 363 - DNA, 149 bp, Rattus norvegicus
  Genbank Accession No. AI009675
cctactcaggctttattaaaaaaccaaaaggtttagggccaagggagggaaaaagggcctggtcaaaaggcaaccccggcaggaggcggctaaacggtccttggaggtcaccccagggctcacaaaggcaaggaatttgcccaaaaagg

SEQ ID NO: 364 - DNA, 623 bp, Rattus norvegicus
  Genbank Accession No. AI009687
ggtccatgaaaatcgcgagaagggtttaattccgtaagtccatactttcagcctctagatagttttacatcattatctccagagcacagtttgattttagaaataggaattatttcccaatatatactggtcactcactaagacaagccaggtttaataactatggcacaaaacatttcacctcacagtactgaatacaacaaatgtttaccatgagctgtaagtcaatcgcaaagcagggcacattcacaaaggagagggaagccaatgagcaaattttcagaatctcccattgattagtaagttatagctctcataatttcacttgtatttcctactaacactttttagagtcagggtctcattaatggcccaggatggcctcagattcacttatgctaggaattgaacccaggacctctgaaagagcagccagcacccttaacctctgagccatttcccctgcccagtattttagttattttatgcttatgaatgttctgcctgttggattctttgacttgaacctgggtcttctaaaggagcagcaagtgatcttaaccactgagtcatctgtgctctccagtaacttgactttaaactagatcctatggcctattata

SEQ ID NO: 365 - DNA, 547 bp, Rattus norvegicus
  Genbank Accession No. AI009752
aaaattataaaattcttttatttcaattatatgacacttcagtttgcctcaaattttactgaggttttggtcattttgcattccactctaccttgtaacagtagtatgaattcacatgattctgtaacgtgtcaacagcagtcatacagtaatcctctggtgattgtatatgtgctaatacttttagattcaactttacagttattttctaaatgattctttatatagaaaatacatacttccttcaggcagataaaacaacaactttccaataagaaaaatatcgagaaacaacaaataaaaatatctataccagatgcaaaattttgaattattacctaatgggtccctttgcacaagaacagccttttgtaatttttaagtagacattcaggcagaaggataactttaaaattgaaaaaaaaaataatggctgtttctcttcagtactaaagtaggaaatataatttcaacatgtcattagcagagaagagtaaaaaataaaatattcgatataaaatgaatttatcacatcacccgcatcttt

SEQ ID NO: 366 - DNA, 571 bp, Rattus norvegicus
  Genbank Accession No. AI009764
gagaaacataacaatttaatagatgaaataaatactccagtacatgcagggtaaaaacttgacattgggggaaaaaaatcactctatagtgtaatttaaaaaataaaacacacgctcacagttgctttccccccacttgcaaagcatatggcaaagtcatactcttttcacaccatgtatactctaattcaacaaaaataacgacatacaaaaaggtagctacatccatgtctaaaggagtgaaaactgaggtaactttcatttaattaaaaagaagaaagaaatgaacccatgacctctttcctgcccaattgataactgagttgcgggtctggagtgtgtaggggtaatcctgcagtcaacacactacccatgttctctgtgtctgagtccctatagtgggctggtagacacctgggccctctgtgtacatgttgagtgcatggccctgccttctggaaaattcctcttgagcattaacatggggaaaaagggggtcacctatggtttctttggtataaatggagaggggaggagttaagtgtcttcttttagcctggggcctcgtgcc

SEQ ID NO: 367 - DNA, 383 bp, Rattus norvegicus
  Genbank Accession No. AI009825
gccttcataagaatttttattattatttagaaatgcagttatatacatagaacaattaaaattaaattaaactttgtacaaatattaaaatactatcttcatacccactgcaatgtacaggataccaaaaaatatatatataaaataaaataaagcaaacccagattgacatcctgcacagtcaattaagcatgtgttgttttaaaccatgacgagtaccattctgcaaaggatcccatagtggtgcacagcctcaagaagccaggccagtatggatacagccatgcaaccctcaactacttcctctccctactccgcattccccacggtgagctctgctactgggagaggacagggtagggtgtgtgtgtgtgggggggggg

SEQ ID NO: 368 - DNA, 104 bp, Rattus norvegicus
  Genbank Accession No. AI009950
ggcaatgcacacctttaatcccaggtcttggcataggtaatgagtctgaagccagcctggtcaacacagtaagttctaggacagccagagctatatggtgagac

SEQ ID NO: 369 - DNA, 244 bp, Rattus norvegicus
  Genbank Accession No. AI010025
catgtgaaagatttattggggtaggtagtgggtggaagagaaaaagagccgtcttccaagacctgggcaggataagggtgcactcctttggccacaggtgatgatgcggcttctgaccctgagggcctgagagcaggctggttctggaacgtgggtggctgttggttacaaacatccctccctcttatttactggctacggtgagaaattcggatggggtgatccatgaggccacacaggatca

SEQ ID NO: 370 - DNA, 396 bp, Rattus norvegicus
  Genbank Accession No. AI010027
gcatacgtctatgtaagcatataccacgtgctggggggggaggggtctggaaggccagaagagatcgtcaatcccctggaggtggactcaaaggtacttgtgaactgccaaaaagagtgctgagaatccaactcgaatcctctggaagagcagccagtcctctcaaccaccgagccccctctccagcactcaaaactgttatttaaaaaaaaaatcaataattattgggccgggagtgtaggccagtgggaaggtccttatctattcatgaggggctttaggattcccagcctcaggaaacaaagaagcaaaaccgaacacttatttcaggactgatctgtggcaacgatttgaaaaaatgatcaaatgaataaagcatgcaaaaaccaggcatgg

SEQ ID NO: 371 - DNA, 480 bp, Rattus norvegicus
  Genbank Accession No. AI010067
aaaaaaatcacaggataactttatttataaatgaatgctattttctctgaactttaaaaacccatgttttaaagtgtacattagcccttcttcctgtctccattctcctcaataacaaattttattaaaacgccatttaaaaaaaatcacaggataattttatttataaatgaatgctattttctctaaacttcaaatcatcagttactcttataacagagaagaatttaaataacaccaccgaaacggaatggagacaaacagtgctactacacggcaccgtgctgcaggccggacggattgccaatcagtcttgcaacacggtccacttccagtgaaatgttcaggacagctaggaagcactttccttcatactgactttattgcaaaatgtcctaggtgtgggctcttgatcgttttggagctgatcaaaagtgtgtgttctgtagaggcagatgccgaggaaccaccgagagttcg

SEQ ID NO: 372 - DNA, 427 bp, Rattus norvegicus
  Genbank Accession No. AI010178
gctgaagattttctatatacatatttatatatacatatatagtattttatttaaaatgtcattgagcatatacagttcttgagtttttttccaggggacgttgcacctaaatttcaaaacacacaaaatagatccccctttaactaaacaggttctcgtttggggtttacaaaagtcgaggtttcacaatcacgaagcataaaggtacatggtttggaaaccaatctccagacagattcttatcgattcactgtatgtagagtaattttttggaaacccagatcaccatgtatgtattcttacaaatgatcctcactggggcccttcctgggtttccaaagaaacaaacaaaattagaggcaaattgggaatgaagaagtgatggctggatcccctaaacacacacacaaaatactcatctaatgat

SEQ ID NO: 373 - DNA, 540 bp, Rattus norvegicus
  Genbank Accession No. AI010220
cccttatagaaaggcacaacagaaaaaaatgattagtatataactataagaacatttacatccaatcaacattcttcaaattcatattttaaaaaaaaaaaaacagcttaagtgataattacaggggagccttggaaggaccattgtgagaacagttctcttgcgcaacaaactcgagacgcggcttgccagagctctttagacataggcatttttatcaaactgttttgaagggcctgtggttttaaaatctccttctccgccttgatacttggtccgggaagacatgactgacgtgggtccattgtacgtgtagcccattctgggtgttttgttgttgtcggatattgaaaagcaaaatatgacaccgccaatgatgcagagagaagctcctgcccatccgatgaagagggcagcccccaattcatacttttgctccataaagaggggatcaaagaattccgttgtgattttgttcgcgtacagggaacagcccgtcatggaacacagacctgacaatatgaatacaaccccagccaa

SEQ ID NO: 374 - DNA, 566 bp, Rattus norvegicus
  Genbank Accession No. AI010224
ctatatttaaaatactgtttattgtgatttaacattaattagcataacatctaagagcaatatcagataacttttacacatttttccacaggatactgagttcacggctcattcattatgtcaaagcaagtaaagagaagcattagcaaaaaggtgcaatagtttactgctgtgtttaaaaaatatttatgcacactgcattcatttagatatatatatatattttctttaaaagttatggaagaggacaattcacaggttactgtgtctacacatgtgtaatacaacgaaagtgatgcagaacataaaaccctcacacagttcccgattcaacgttcccactaggagactaacaggttccagtagttagtgaggtctacggcgacgtctgcggcatcacacgctcagacagaaccagcccagggagcactgcggtcacgtcacgtctgcatgccaacttacccgccaggcgttttgcttccactcactgagtattgagatcattcatttacagtgatctgtgacattacttgggaaaatggagaaaactatattaaatctagatt

SEQ ID NO: 375 - DNA, 421 bp, Rattus norvegicus
  Genbank Accession No. AI010332
aggtttataggcatttaatagtttaccaattggtacaataagatttttaatatgcagaaaacatgaataaattttgttttacacagtctgagagcaacaaatcttactgtaaaacacaagagcaatattatatacattcctttactgatttttaaaattgtgtcgatatcttcagtgaactcttacaatctggggaactgttttttccaattaccacctctgcaacgttcatatgaaatcaatgcttgccttcatgtcagtgtcaggatcgacttctaactcgtagagtttgtgtttatttctaacatcttcagagtgagctttggggatgcctttaggataagcaggcgagaaagcagctacttacatgatacagtgaaaggataaaaaggcccgtttcagtcgtgacttgtgagtccag

SEQ ID NO: 376 - DNA, 515 bp, Rattus norvegicus
  Genbank Accession No. AI010339
  misc_feature (1)..(515): n = a or c or g or t
aaagtaaactctttttaattgaacatttctgtctcctgttattctgcggggtgagaactgtccttccttacgcacaaggaccgtctcttcgccatcaaactgtcggtgaggggttaggctacgagcaagcccacagcctcttcagggtagggagctcagaccgtgattgtatttgcactgtttgagggcctcgctgaagccctcacacagggttaggtcgctctgagtggtggagcagtccaggaactgcttgatctcataggcgcagggccccatctgcagggggtgagaggcaggacgggcaggggcctgctggaccgcaggctgggcaggctctgagcttcccccactaaaggcactggtcagggcgctacccatgacatgccctacagctgagcccacagctacgcccgcggcggtggatgccatctgagccataagacccggctgtcccnaggtggcaggtgcggnggcggnggctgaaggtggtgggtgcgcangaggatgggctgggc

SEQ ID NO: 377 - DNA, 664 bp, Rattus norvegicus
  Genbank Accession No. AI010430
  misc_feature (1)..(664): n = a or c or g or t
agttaaatacgcacaattttattgattgaagagattaggacaaaaacattaaaccaaatacaggacaaagcaccagaggccattagtccccatcatgcatgttaccaatctttcctcccacccaggactttaaaaacaggggagagggaagataaaaggtccttcttgccacagcaccatcttctgaatgtaaaaaccctttctctgtatcttccattatcaaaatagaatcaagggtaaatccatggcagctttgtcccctgattatcaatggggaagctgccctcctggggacaggggctccagtggagtaggcgtgaagcatccaagagtccgcacacacatgccacatacgagagtgaagcacagattcaagtaacatttacatactagagtccacgtgttacctacccaaaaacaggaccatttcacaanacatatgcaagcagtaaaacccaaatgactgaggtactgggaacacaaatatttatgccaaaagagttctgtatcatacagcaatanaaaagccagaatacaaaaggaaaacattttgccactcgaaatcaaataaggctatctagagagagccaaataaaaggttattccagggacagatatactcaatacaggggaataaaattataaatgttaaactacagcatgt

SEQ ID NO: 378 - DNA, 605 bp, Rattus norvegicus
  Genbank Accession No. AI010435
aacagcacctgtaaaaaaatgaagacagtattctaagattctaagatatagatgtggactttggaatgttagattgtcaaaacatcaactgtatcacatcagttaacaaacagaaggcaaggcaggctaaacaagggcagaatcttgttaactagaaatattaatagcagcaacttttgaaagatgattttattaaggtcattgcacttggtcatttattgctacagcacaaggccattcaattgtaacacttctcaattctgattgcaaagattgtctcattccgctcatacatttcaagtttaaatgcaagcataaaacattcatcaaaaaaatctacagagcacttagaatggatttcttgtctgtgatcacagtaaggagtgtaaggagtcctctgtcagaccaacccatcctcttcttgcatcctctgattttctgtgaagtcctggacagttggatagaggtaatacctttatagaaagagcaagcttagtggtcacaaacacagcaaaataacattgaaatcactagacacttagtggtactgtgtttcaaagaccagcaaatctgaactgtacattcactagtaatttggcaatgac

SEQ ID NO: 379 - DNA, 439 bp, Rattus norvegicus
  Genbank Accession No. AI010470
aaaatatgcaatatatttcgatatcgtatacaatttaaatatggcgtgatagcacatgtcttgttaatttagaatatagcttttgaggggcaaagtctatagttgatcacatttaggagctttggaatcctggctcctggatggaactggtgatggaggaagcccctgagctgagggactggtcttgttgcagggaaatgagctgtacaaccatcttcatttttagaatgttcttgaaaacaccttattttcctggctactccttggtagatatttggaataaagtagtcatgctgattaacagtgtatagagtatgttccaggtcatcctgtagctctgagacgatgcttgatttggtaaaacagtgtaggtagttaccatccccgcatgaatatggtcagtcacatggcagtggagtaaccaggttcccctcgtgcc

SEQ ID NO: 380 - DNA, 394 bp, Rattus norvegicus
  Genbank Accession No. AI010542
ctttctttgtgtagactgtgggtctgtgtctctttaattctggaaaaatgttctccacttagaaaaaaaatgggcttcaaatttggtaacaaaccttatttacaagagacttttagctgtgaaaatgcacattcagactagcaggagaaaaataacaatgcaattctttcccaggaggcttcggtgtctctttgaaaatttaaattaacacaaagtagcaaaccttgaattaaaaaaaaaaatcactgtataaaccttatcttttaaaaagtctcctcaatatttttttcattctatgacattctacaaatccttgacttttttttaaactggagacattatgccctagaatttccttaattgcactttaaatatacttgaatttacccaccct

SEQ ID NO: 381 - DNA, 477 bp, Rattus norvegicus
  Genbank Accession No. AI010568
ccaagaaaataaatttattgaactttgaggggaaaaatccacagacataaaagaaagttaaatacagactgcaggacacaactagtcacatggtgaataatggcttgtgtggccagcaaagtaccaaaaatgacattctgggactgattgaggtatttagctatttttggctatagcaacgtggtcagcctatggtgaaatggtaagatagttcatcaaaacacacatctttaagctgaataggttctaaattgatgatacttcatatgaactaaatcatgtacccattggggaaaccatagcagcaaggtatcagaaaaaaatctattaaaatctactacagaataacacagtgaaccttaaacacccaagtctaaatttttcactgtctctcctgcatgaaagagatttaaaaaccactaaacattaaccctgtttccccacaaaggtctctgcaaaatggtaaatatcattgaa

SEQ ID NO: 382 - DNA, 105 bp, Rattus norvegicus
  Genbank Accession No. AI010584
gacggctatcaagtgcgttttattgaatccattgtggatagatgaatgttacacctgcgtgtcgggaggggcaaaggggcaacgagggatgcagctgcacatggt

SEQ ID NO: 383 - DNA, 519 bp, Rattus norvegicus
  Genbank Accession No. AI010962
  misc_feature (1)..(519): n = a or c or g or t
acagaatataaagatttccctcattaatctctcatgtgaaggggattacaggccagaaggaagacacattctgcacacaaagtacacctcgtatgtgtggcactggagacaaatggtgtcgtgctcctgcacataaattaggaccaagtggtgacatcacacatcaggggtggggagaaatatcctagtcaatcagattcaagaagcacacgacacagaaactgcaaattcgagcaagtcggcagctttagtcagaacactgcaggtctacagggctgaggctacagtgcacacggagggacacggtgggaagggctacttagaaaggctggagaagtgagggagtttccactaaagcanatgaacgtcttgccaaacagacagaatgaaagggagcgtgagtgttagtacatccagggcgtgcgcgtttgttacagcagtgtctgcagcatgctaagttagttacaacgtcttcattggtacggacgaatcattcatgggcttggggtttgcctcttc

SEQ ID NO: 384 - DNA, 463 bp, Rattus norvegicus
  Genbank Accession No. AI011058
aaaaacgcgtggcctttatttggctaaatgacaaaagccaaaataattctgcacaaagcattagacagtaacgtgatacactgaactcagaggctaactccccactgacgctggtgatgtcatgggtgactctttccaacagtgttttctgttcaggagcctcaaagctaaacgcccgaccaaccaactaactgttcagaacagccagtttctccaatggagtggaaggtgctcacgtcaaacctagtgagacccagctggggccgtccgaatgttaatcctggcattcctgttctcttccccaatctcatgccaacaaaaagttctggcaagctgaatatatttcttttttcttttaggagagttaacttttaatagtttaagtccaagaacatgtcctacttattttgaaaaatagaagctagggaccattctttatcccatgatagtctattctgtgaga

SEQ ID NO: 385 - DNA, 689 bp, Rattus norvegicus
  Genbank Accession No. AI011510
aaaaatttaagagctcatttatttaaactttactctcattcaaggcaccttccacaatggttgaccaggtctctgggtactgtggcccagcaaagctgacacataagatcagcacacagggttgagaaacaaacaggtgacatttccaatcgtttatctgaaatccacagggattagctcaatgatcctccgggtacatgagggaatcgtcaccattttagacatgaaaggttagagaatttacatggtttttttgggtgaccaccttggggggtgggggagacaaaaagccatttaaacccaaccactgggcaccggagtcactactccctccagtggcatcacacagaaccatgcgacaagtcgctggcagttcgttagattaggaatgagaatccagtgcgcccggcacctccctccgtggccactttgagtaggtatctggcattttctcaggtggcagtaaatgcgcctcacagtatagaaccagcagaatcgggacatttgcagtctagccctgctccctgggaagcaacatggaccctgaaaggaagcaggacagagccggcctggtactggtgcctgcccctgagagtgatgagggtagcccttggtgacagctataccaacttcatgcggacccctggcaaatgtccttgaaaggaaaccccacatgctctcaagccact

SEQ ID NO: 386 - DNA, 471 bp, Rattus norvegicus
  Genbank Accession No. AI011598
caaacaagtcactttaattccatacccacaattttacagatctcagtactgaaagctgtcgggcaagagggacaaagtataaatatgtctgttccgcagtgtaaaccagaaatgacttgttaatcacaaaaagtgtacgcaaacactaggtctgggaacctcaatgccagcgtagcgggaagacactggggttggcctgcctctgggtcagtgcctttccctgcttggaaattgctagggttcctgaggggcatccgctcatccccactgctccctggatgcgtgcagaagcagtcatgttgacaggggccccgttgaacagcagcttcctcagacatcctcggtaggcagggggctctggccaggcagcttcaaacttgggcgggctcccaaggtgcaaaagcgctggagaatcagccaaggtctctggcaaacggcctgtggtgtggttgctgtgtgtgtcgacttcta

SEQ ID NO: 387 - DNA, 426 bp, Rattus norvegicus
  Genbank Accession No. AI011607
agaatgcgtttgcattctgatttagctgaagacaaactatgtaatagaatttgtttccttttaatatggagattatttcttatgtacagtgattataattatatcaaaaaggtgaggaaaagattagactcatgttttaactagatggtgatgttagacaactcagaagccctctttctttatcaggcttctcctagaaaagtaaggaaaaatctcttctgtagaatggaaaatagacaatctgaaacaatttttaatacaatattgttctgttgatataaaattctcgtagtagggtaccgagtgtattcataatcctagtgctttaaattttaggcatgaagacctagaattcgagcagtattcagtacatcatctctagtcaaatagcagccacacagttgacggtagccagtgaatgactcc

SEQ ID NO: 388 - DNA, 426 bp, Rattus norvegicus
  Genbank Accession No. AI011678
cggcacgacagactttattttggcacttaaacaaatttgctttacagcagtgacaaaatatttgccagtattttttccctggcatagatattccaagcaagtcattctacaattagggtttcactgttttgcacagttagaggtataaccactacattctcagcctccgtgattgagggcattgtgcagctttggaagggcccatcatttcctcttaattctaaataaggtgaattacggctataattggacagaaattaaggccattaaggattcagacacaacactgttccaagtgttactttagttttgtttgaatgagttctgtgacaagcccagggaaggtgctcaaagtagtcaaacttttatcgaaagttgactgtatgttggaaaagttgcggttcttgctgtcttctttctacttcc

SEQ ID NO: 389 - DNA, 643 bp, Rattus norvegicus
  Genbank Accession No. AI011738
actaaaagtttgctttatttatttttttttgtgaagtcaagtgctagctattaattacagttagattttgttttcgttcttttcaaatgttatcagaatattagcatcaccttatcagtaatcaaatacactaggtttcaatgtttctgtccacatctagaatgttcaggtgatcaggaactctcttactggattcctttagatttgagttcttgattatatttccagatccgaaacagctgagaggctcctgctgaccccacaaagaaattaacagcgaacaaactccaattttttggtataattacaagtgagtaccttgaccaaataaaccctgtagccatcagcacagtggattgagctgtgctgagtttctctgcaggtctggccatgtcagctaatccagcacataccaatccccacttcattatcggagcccagaaaaaaactgttctggggcctgccgggtggttgtatagcggcctcaatttctttggcagcaacaactccactttatccatgagtcggtggtaggtggcccgcaggccttgggcgccggcagctgccatctcggcggcctaaggatccactgcagctgggtgggaacgccgctgtgtccgcgttcctggctgacaatgaaagg

SEQ ID NO: 390 - DNA, 468 bp, Rattus norvegicus
  Genbank Accession No. AI011746
gaggcctaaagcccaaatcctgcaagctgggctccaggcccaggccttcctcagggcccacagagcccacaaagcccagggggcacaaaagggaaccccctacacacaaggggatccccaacctgccgccccacctggcacacaggtcaaaagcccctttggggctggtatcaaatctagcttaatccttcttgctcccgtgttgctggctggggaacttttgatgcaccactcggagggtggtgaaaaaattgccaaggaagaggaacggaagcaggaaggtgaggcctttccacatccaagactgaaagccctccacagggaggtccatggtgtgtcattcgcccagggctcacaggcggtaaaggcacccgttctggtagtaatactgcaaaaactgcacaaaactctggtacatggagaaagacaggaactggttccggaacttctggtacatgagtccatttg

SEQ ID NO: 391 - DNA, 518 bp, Rattus norvegicus
  Genbank Accession No. AI012114
caaatgacaaccagcaggttatagctctttattgtctcagtctacacctggcccaggaatgctcccatgagcagcctctggttcaggggagagcttggtggtagtctctggacagtctgtgatggggatatcaccagaggccacaggagctgcagggctgtgtgaatagcagcactggtctcctagttgacaggtaccctctttgaatcgtttgcaggggaatgtcttgaggcgagcggcgcgctgggctgggtcctcagctggctccttccgcttattctgcagcagcctccgcctctctgccagaccttcactcgctgccttgccccctggccgggcacggggccggggaccccagttggcttctggattggcctggaagcgcttaagtcctcgctggcgggagctggggttggcatcttcccggatgttgaagttggccttcagcctgggctccacagcaagaattcggaatgctggactgctttcagatagccgctcccgtttcactggacact

SEQ ID NO: 392 - DNA, 574 bp, Rattus norvegicus
  Genbank Accession No. AI012221
actgaaatacgttgtcttacccaacccacccaaaaataaaaatcttacccttgtcctctaatctttcccttatccccagtcccatccccggccctgcacaagtgccccggatttcctgcccattggctatatcggagtgtgtccattatgtagcaacgtggaagcctctgtggagagcacagagtgggtgaaggacccttaaaaaggtgctcatttgagagccctggccacttgctcataggccagctctatctcttcatcgtcaggacaggtggaggcgaattcttcccgagcgtaagcgttgctcaagtaccgatgcactccacggaacgcctccgggatggtgaatcctctgtactttttgcacaccacctggactatgtgaagctttggcagcaggttgcagtcagccagggtgagctcattgccatccagaaacttcctctgagagatgccctcatcctcggcgctggtttcatccacttcttccgggaggggggatgtcaagtaattgtctagaaccttcagggctttcaggagtcccttctctaggttgtcattgagggccgggttt

SEQ ID NO: 393 - DNA, 632 bp, Rattus norvegicus
  Genbank Accession No. AI012240
cagtttgagtcttttatttataaatgtacatttactataaaagctgttgtgtcttagacaacttttcatttttaatttttttaaactatttctcagaggcattttagaataaatattgtgaatgaaagttagtgtaaccgatacagaatgccgccacccagaacagggacatcctcctgaatggactcacagcaaagagtgggtcacttcggctcactgaatcgtatgccatgtactgggaactagactatgtatcgtgttaatgactcgacacagaaaggaggacaaatgccatgaaagtgtgctagtgagaaacagtcacccatttctgtccttggggaagaagcctttggagtctgagaggggaggtcccgtaggagccacgaatcgctcacttgccttgtctggttcttaaacagacacatttacatcacagctccacataacagagcatttttttctccctgggatctcagatattatttgaagagagatagatcatagtcttttatgctgccttggaaaaacggcaagatgtagcctgccgaagttgccatgtaactggctctaaatgaaatagaaatcaaatagaaatagaaacggttggcaattagaatttcgaagacgttgga

SEQ ID NO: 394 - DNA, 636 bp, Rattus norvegicus
  Genbank Accession No. AI012356
ggatgttaaagtagttacagcaatatacaaaaacaaacaacaacataaaacaacccacaataatataaatttttacactagaaagtatacattggaatttgagtgcagtgaccaggacagaataaaagccactgtactgggaggccaagcaaactgcaggcatggctgggtgaggttggggacaagtggggccaaggggaggggaagtgggccgttccaagggctcactatgggtgattaacccagatacagacttcccagaacccctgaggtacaacacctgccccagagaagccctcaccttgttcctgggtccccaggattggaagccatcaacatgcccacgccttgccttcctaaataccctttcagtttatgagttcagcttattgtgtaactaaagaacctggccagggaagggagagcaatgactgcctcgaagcagaaggctggggtggtcaaggcaagcagtttgtcttggagacaatgtcctcactgcccttaattcagacactggttaactggagaaaaacaattccacagacagatcagctgagtaaggtggctttgagtcactgaatctagccatgcccctgtatcaagggaggcttgccttgaaccactcagtgttcaagt

SEQ ID NO: 395 - DNA, 561 bp, Rattus norvegicus
  Genbank Accession No. AI012379
aatggcaggtcaacaaatatcctgaaacatacatagattctgatagtcttctaaccccagttgaattcaaacttgaaagtaacacacgcgagctaagggaagtcaatgttgttccaaggcacttactgaatctccatgactagacgaaaacaagaaccattagggtgaacaattagacagtatataatataaaaataactttttgcttacaatttacaaaaggtattattattacactctttgatctctgataacctgcaatgctggctacacgaatccagcaagtttaaaattcagaaacagttttctaaaatttcagggcaaataatttacaagtaagatacacaaagacttaaaccatgcagaaattcttacatcttctgttaataatattttaggacttcaactttatcaaattatatacctacttgccctgtacatatacaaaataatgcatacatgataaaacagcaaaagagtagtcctttaactcagtttatcataaaagtattactatattaacaggtctacaagcagcttgtaacagggttaagagacatt

SEQ ID NO: 396 - DNA, 573 bp, Rattus norvegicus
  Genbank Accession No. AI012457
acaaaaattaaaccaaataaggaaaaaggtaaaagagagagaaggaattttacaaaatggcaactactaggatctggaagatgcagaaatgtcttcattccattcagtaactgggctgcttctggaatggacctccgcagataatgaagtcagagagtgcccctctcagtgttcaggtcaaaaaccaactgggcaggaaggacggccttcaaaacagtgactgtttaaaatccacacagtgaggtttagccagaatactcaagatcagaacttgcatggaccaatctttttagttgtaacctagatttcaagtccagggacacgttgtaccatgttaagaaagaaaacatgatttcatgattcaactcggactggctaaaatgagactgtgggtcacctaagcagccaatgtccctacagaagcacaaagacatgattagaagagaggagtctgagttctgtggtctggtcaactgctcagcacaggaaagacatcccatccatctggaaaggttcagcttctggacggcactggcccctgcagtgggaaggaagacgtcgccacggcccatg

SEQ ID NO: 397 - DNA, 539 bp, Rattus norvegicus
  Genbank Accession No. AI012464
aacagtatacaagagtttatttaatgatatgaatttagctccatcacgtagggccacgttacaagttccgtctgggcccattacaactctaacaacaaaaaaaccttaaaaaaaaaagaaaatccacaactttctccatgtcattaaatatattcatatataataaccataatatattagtacgcattggaaagggacactggcccaaacagtatgtcatggtcacaactaaacatttacaattctgtgtgagcagaatcggcgacacaggagggaggctggcttagtttttggctggggcagggccccacaaagagaattttgatacccctggggtatggcatggctctggtccacaggaatgtctgtctgtgaaccacagcccattcgtgagcctaacttgcccactctctaggtttcctggatagagcccttcagtgttgagaccctaaaggaaccatctcccaggtcagtcccaaagggtcttcatttcagtcctgttccagctcggggcaattctaagagagcctgaatgtaac

SEQ ID NO: 398 - DNA, 631 bp, Rattus norvegicus
  Genbank Accession No. AI012589
ctgccttacaaactttattagtctgggaaaagggggacaaggagttcctgtcccttcgtccactactgtttaccattgccgttgatgggacggttcaaatggtcaggggaggacagaaaggccttgatcttggggcgggcactgaggcgagccacataggcagagagcagggggaagttgtccaggcagccaggggccaggacttggtggaccagcagcaggtccagcaagttgtaatctgcaaaggaaatctggttacccacaatgaaagctttgcctccctggttctgggacagcagggtctcaaaaggtttcagatgcccaggcagggccttcacatagtcatccttaccattctcatagttagtgtagatgagggtaccatatttgcatcgaaggtcctccaccccatcattcaccatatccaccaaggcagcctccttctggtctttcccataaagccctaaagagcgacccaggtgcctcaagatggcattagattggtaaagggtgaggtctccatcttcaaacttggggagctgcccatacagacaagtggacttgagcgagccttgaagccagacatctatggtaaccacctcctccttccagctctggccctggtcagcca

SEQ ID NO: 399 - DNA, 651 bp, Rattus norvegicus
  Genbank Accession No. AI012590
tttccacatttcaacatgggaaatttgtaaattggttttatggcaagactgttttttattgtgaaaccactagctactgtttacaatgaccaatgtcccaaggaaaggtatggggatttacaacttgatatcccgttaactaagggaacatacaaactatctcaggattccgcagaaaaaatatagacaataagaagtggttttaaacaagtgacttaaaactaaattttcaaatgcttacttttggcatctggcattaatactttttaaagttttacaataaaatatcaccgtttgggaaagttaccacatttcctaatgaccgactaatgacgttacctgaattaacactgatggaaagtacacaagcaatcaataacttaccaacagcatctcaacttcagaaacacaagagttaaatttagcatcttcagtgtttggcttcttgggccaacaaactacttctaaacaatgtatgtgcacacttattcagataagagggctcctttggcacctgagttgagtataatacaaaaggaaagaatatctaacataaagctgtttaaaggctatatcttatctatctatacatatatacacatacctgtacacatatatgcacacacatatacaagaagcatacattttttc

SEQ ID NO: 400 - DNA, 666 bp, Rattus norvegicus
  Genbank Accession No. AI012598
cagtaaaatcagcaattgtttattctagaatctagctatcccattattaggacacaggtattcacacatttgtagtaccagctagatagccccaccattgctttgtcatccctaaggagctccccagttttcctgtgctcctgtacttcccctagggtgagagggaagtctctgtttcctgtgcagtgaggtcgggaagatttcttggggtttgaaggtcttgatgttccagggcccctatgccattagggtgttgttgcatcctctcaaacaggataagcatttcacagtgtggggtctgtgggaacaggtccactgccacagccttgactggatggaatggggtacctttcactcggttagatggggctctgcagagatccacaaagttgcccatggctgccctggggttgcaggaaacatacaggagccgcttgatgttctcagctttcctcatggccagaatcaccttagaatgtaggccagcccgtggtgggtctagaacagctacaagttgctgggaagacagtttgctcaccaagcctggcaccagatcctcagccctgccgcagtggaactcaacgttgctcagctcattggtgagggcgttcatacgggcatcctccacagcctcctggcacagttcaatcccatttactttcttca

SEQ ID NO: 401 - DNA, 436 bp, Rattus norvegicus
  Genbank Accession No. AI012689
tttaatggaatagctttggcgcaggcaaaggcagctcctagatatctcagggcatgtggagccccaagaagtggggacgtttgctaggtttctgggttttatttcctggtgcacgaatggttggtccctggctccaggcctcgcgcatctgttcagccttcagtagcaaagccttgatctgtgcattagggatcagagctgctgcttatgcagaagccaggaggtgcgtgaagaccactggccggtcttcacagcgcaggaagttacgctctctgccacaaagcgagaggaaagggaaggaagcctcgtagcgcccgctgtggttgggtctcagacgggagaagaaagtgaccaggaattgcaggtctttgaagcaagtgataaagttctcattttggagtcatctaggaaaagctggccttggtgattcacatag

SEQ ID NO: 402 - DNA, 484 bp, Rattus norvegicus
  Genbank Accession No. AI012781
caaatttgaaaaatgtaccatactgcattattgcaaaaattcactggtacaaaacactttgcagctggtgagaaggcaataaaaagttgattttaaaactcattactataaattactgttacagtactttgcaaattcaaaatttcaaactgcatttcctttttctaaattgcccacagtactcaaggttcctgaagctaaggcagctgtttgagaggaggggaagaggtagtagatttcaagggatttccatttctcgttcgatgcccacatacttcagggcatcagcctggctgtatctgtaatcaaagaacaactcttcaccagtctggatagctctcttagcaaagatgcctatcctgtggtcaccattaaccatcataacttttgcatagcagtttggatttactgaatgattagcaaaacgaattttgttgcccttgcgggttgcatccaacacaaaatcattgttcaagttgaacaa

SEQ ID NO: 403 - DNA, 368 bp, Rattus norvegicus
  Genbank Accession No. AI013260
ggcattccaatacactttaatcgaaaagactttggcatggcggcgggagagctgccctaggctgccagggctacccttgtgggctgggcctcagcggcggctgccactcacacggtggtgatggcgcagctcatctccatcctcttcctcatcgtcattgtcctcaaccatggtcagtgagcgcaccagcttgcacatggccacttcttctccagtggcgttgctgagagccgtgcgaaggctgcgcccacagccccaagtgttctgtgccttccacaccaagtcagtaagggggctatgggtgaccccatctcctgaatcccagatcgtcaccacctgcccggcctttagggtgaacttcggtggga

SEQ ID NO: 404 - DNA, 487 bp, Rattus norvegicus
  Genbank Accession No. AI013297
aaaggtcacatttattaggagattaaggggtgcattatccatggactataaatagtgcacagctgacacttcagtcacagtcaagcagaaatgtagccagctccaacctattttgtagacactcttgttcttttgttccaagaaaagtttgcaccgtaagacttggacttgggtttcggaaccttcctcccttccacgtcatagctccatccatgcttttctgcaaaggcaaccgcatcttctttggcactgaaggtgagaaccatgttggagaggggatcggccgttgatgcccaacccatcaaaggattttcccatctctctctggtatcaaactccatcttccatttcttcgtgttgtttactccagactgcatgttattgcgagcaggaacaaagattctgacctttctggttttgatgtgctcttctggaacaccagttagaggagtaacatcctggatggaactctgcagacggaaaccgc

SEQ ID NO: 405 - DNA, 670 bp, Rattus norvegicus
  Genbank Accession No. AI013394
gcggccgcacgtgttttttttttattttttttttttttttttttttttttccataataccaataaatttttttaagcagaaaaagattatagatttgacaaggagggttgcaaacaaagagctattttgaattggaggcaggttaattatattaaaaaaaaaagacgtctccagaaaaaaaaatctcttatttttttcagtgcaatagttaagttccttcatattatagagacatacacaatgttaacaaccatgaaaaacaatacaaaacgccctccatttaacaagtagaaaaatataactactatatatggcaactgtgaatctaatactgtacagaagtcatttgtgggttttacaaataaattatagcttaaatgcttttttaaaatttgttcctccccccacttcagatgtacaccagaagttacaacaggaaaagtcccgtgcctaacagacggcaaattagtgccagtcgaatgttctgcccacgagcttgaaaaatttcttatttggctcatgaaaatattcgtgcagtttatcaagtagtttgggatctacttgagggtgcgcccggcctttggactcatgtaagcagcggtccttgccactgtcccgcaggcagtagaagcccttggttttgttaaagtagaagttcgaggcgttgatc

SEQ ID NO: 406 - DNA, 348 bp, Rattus norvegicus
  Genbank Accession No. AI013564
gcaaactctcatttattagtgtaccactcaatcttaaaaaaaaaaaaaagaaaaaaggaaaagaaaaaagaagaaagaaaaacggctccaaagctagtcttacaccattctttacaaaaaggaggctgactgctccttctaatgcaccggcccacaccccaatctcagaacacttctctcctgtttcttggtcgtggacgtttccaagatgagatttgatatttcgctcccacagcttctggttatcggaaaagccatgctttcctttattaaaggagtttggtccggctgatgttggcgtgtcccttccgatgttcttcatcctcatcttcgcttctggaggcattt

SEQ ID NO: 407 - DNA, 507 bp, Rattus norvegicus
  Genbank Accession No. AI013568
gacatatcataaaatgtatttaatagaagtcacacagtaagaatatggaagcagttcagatataggtttgtatcttagaaaacaataggcagaagaaataggaattccacccctgaatgaagacagtagtacccagcagtgcatgtttgacagtggcggatgaattaatactccaccaccatctcccccacatgttcttaggccacaatatggtgtttacctaattctttattagaaaaacgacatttttgaatactcagttcataatacccataggcacagttgaattctgttagctcaaatgaccggccactgccagctctgtgaaatttctatgtgtccaaaactgcacgtggtcccagacctacagtgattcactttccacgggctcaactttacaatcgggtgcaaaaatggcatgtattcagtagagactgcttttgaactgggagcttttcctgggttcacaatgtgtgacaccatcctttggagacacgggacagtggc

SEQ ID NO: 408 - DNA, 498 bp, Rattus norvegicus
  Genbank Accession No. AI013697
caccacagacactaagatgctcgagtaaatgctggagaaaggccttttaataactgatgcgaagcggaaccctgggcatgtgctcgctccccccacccccccttcagcatgcagctatcgtcacatgggctgatcaagagtcacagtcgagtttcatgagtctgtctcctgtagcagaaacaatttcaccgagtgcacgcaactatggcagagtatcaccattctcggcgaccaggttggtacatctacaccatagtaaacattaaaatctgagtccgtaaagcattgttaaatcacacaaaccaggatttcgttttaaatgtatttatgaaatctgctgctgagtccaagcatgtaggacacacgaccacctgatgaagctggatatggaaggccttcagtaggtccaatggcggagtctttcactcgtcccaagtatctccatatttgtttactttgacttctttttggggccctctttcctgcataggcctgact

SEQ ID NO: 409 - DNA, 446 bp, Rattus norvegicus
  Genbank Accession No. AI013738
cagtctgcaggagaccatatcccacccatacatacccatgcacacaataatggcattcacccaactctacctgacaaacatcttttgaatcacagggacaaagtcatacttggtcattcccacactgctggtgacaccagttacatttggtctttttcagaaataagacagttgatgtcccaagaaagctaagcccttaactagagaggttaagaaccctggaaccagcaggcacaacttgaaatatttgccaactccttcattaaaaggttattcttaagactatcttcccatgggttgagctaaaaccactgaagatggtctttctgtactttgcagaggacagaggcacactcctttatggaggcggtgtgtaagctcatgagtgtagacccattgagcctggctgattctgccgtcctctatcacagagaaggaaggcagaa

SEQ ID NO: 410 - DNA, 539 bp, Rattus norvegicus
  Genbank Accession No. AI013740
taagcctgcggccgcatgtgtttttttttttttttttttagactttgacaatactttttattgtttatttagcccttcacagctcaccccacacagagaaaggttcttatttgtagtgggtagctcattttgtagcttatgtggggaatatggttcaagcagaactcatgtctggctgctggtactgcagagcaaaggggaatctaggcacacccataaagtgggttgattggcaggctggaagacaaagctcccaaaaaaggcactttaacagggatgtagctcagtagagagtgcttgcccaggaggcacacagctctaggttcaatctcttgtaccataagcagtttccatggggtcagagaatggctggagagttgtggaaaccagaggaggtattgttttggagacaggacctcactgtgtagccctggcctcaaactcagagatccacctgcctctgcctcctgagtgcttggattaaaggcatgcaccaccaccgccgcctgacaggaggaagtttctgatggaggagctat

SEQ ID NO: 411 - DNA, 395 bp, Rattus norvegicus
  Genbank Accession No. AI013829
gcctgagtactgagcagagaggtggaagccagtccaagaagctctagagaacacaatcctgtcccctctgtccctgtagtctcctcccacagtctctccagcctccttggctgagcccaggcatctgcaggtgaatctcttctgcagtcaacgttgggactggaaggaactggattcacagctggagagtttgtgaagtcaaacccgggggctcgtaatcccaagagggcgaggagaggccaaaggctcaggatactgcagaggccacacccaaccggttcctcctctctgcagcacacagggaaacacatccacatcgaggggccttcaggcctgcctgtccttccaggaaggcttcagttctggagttcatgcctgaatcaggtccggggcca

SEQ ID NO: 412 - DNA, 568 bp, Rattus norvegicus
  Genbank Accession No. AI013861
  misc_feature (1)..(568): n = a or c or g or t
atcaggatagaaatttatttaaatccaaaataatatgactatagttagaataatataataattatctaaaggaaatatcatcattggctctgaaacagtctaacggtgtcatttttctggagtcaaaaacatgtagtaaaaggatatacaggaagcaaaaatacagaagcaagccggctgagtgaggaagctgtaacaggagggtacactaagatactgtaacaatcgagacaggaagacaagtatagcaagctgtcttacctatcaacccctgcacagtaagtcagtaacccagaatgaaggaataatagcacgtggttaacaggacaaatttccctctaatttgtctttgtaactgatttctttccttttttaccatgggttccatctggttaacaaaacatttggttttatttgtaaagcagagtaaataaaatatcctgatcagagtgctcaattttgtttaaggtgctcaaggttcanacttaaaaaggtcaactgggctagtcagtgggaaccattgggtgtgtttgctaaacagatgaaagcagcagcatttaaaatggat

SEQ ID NO: 413 - DNA, 694 bp, Rattus norvegicus
  Genbank Accession No. AI013911
ataatcaggacagtgatctttaataaaaaacatctctagtaatcatgatcttgatgtagattgttcataggtacattcagaaatcactttctggccatgagaaaacatcatttacaaatttttaatgtcccaaaatacacattaatttaaaaaacttgatttatcctggccacttttttctcttggccagcaacaataatcctgagtgcctcaacaaaaattctgataaaaggaaaaatattgggaccgttaacaaatgtcttaaaatttgtctttaaaagggggaaaagtgtttaaagaacacatggagctttcttaaagttctttaacaaactaccttgggagctcaattcaaaaatagaacttgatgtactaaaacagacgtttcagcgcagctccaaaaatctttataaatacagcaatttgcaaggacgatcctggatcagaagtgttattccttgtgtatattgtgtgcatgccccatctcagttgtcataattgtctctgtaatttcctcctgagtagcggtcatagccaccctggcttctgccactgtagtctctagaccgcccatacccatatccatagcctccaggtcggctgtcgtatcttccacttccatatccctggtctccaccacctctagagtagctgcgaccacgcccatgggccccaaaagcaccccctctgggtt

SEQ ID NO: 414 - DNA, 455 bp, Rattus norvegicus
  Genbank Accession No. AI013971
ggagatgtttgatcagatgtaataacactgattccaggccaggacagagggtattgcccctgaagcaaccagtattctgtggcccaaggtgcccctccgttcccagacctgagttccccgtcggttagttaaatagagggagatcttcccagggagtcttgggaggagggtccgagtcctgtacccgcctcgtccacgcagaggtgtctgagcacaagctatttacagtattcacatccactgtaccccaccaaaccaaggcaaatactacaagtggtccttccccgtggggggaggccagagaggctatgagtgtatgtgtgtacggggaaggtgggtgtccgagcgtgtgagcacatgaacgtgctgagggacaggacctgctttcagccaaagacatcatcagtctgtaaggtgcagattgaaaacaaagaggagctctgcctccgggagcc

SEQ ID NO: 415 - DNA, 446 bp, Rattus norvegicus
  Genbank Accession No. AI014165
gagaaataaccaatttattctggcgcagacaggcctgccttcccctatacaaatagctccctctctcctccatccccaagataaaatgggcctctgtctcccatagctgagggtctgtcagactctgggcacactggatggctggaagatcttctgtttggaacagcccatcttccaccttggtggctgctcaacgaccctgagcacagggaccatgaaactcaacggagaccacctctggatgtaagggtttgtgggggaccctctcactgctcttgacaagggcaatgtaccttaccatcttaagcctagacagcatagataccaggatttaaaaaaatagattctcttggggtgcaaaggagactatctacaaaaacactgttgtccctggaaactaggaaagggctcatcagctatccaggaggtttctggctaaggcaagg

SEQ ID NO: 416 - DNA, 478 bp, Rattus norvegicus
  Genbank Accession No. AI029015
tttttttttttttttttgcattctttttttcctaagattttttttttttaatttgagtttctgtagttttatctttttttggtatcgaagtcaggtttttctgggcagaaaaaaataaagaggaggaataaagaagcgaagataagtgtgaggaaaaagcaaccgaaataaaaataataagattaataattaagtactactaccacaggggaggaaatggagagaaagtgtctgtgggcttaacagctacccagaagtccattctactccagcaggaagaggtgatggtaaaccaaggtatacacggcaacgccatttctcaggagggaattgctgctgttggaaacagagcactcacactcgtacttagagaatacgaagaaattctgggacacagtttgttttttaaatggggagtctatagcattgacctgatctgaaatcctgaggagctgagtttctaaaggccacactcatt

SEQ ID NO: 417 - DNA, 369 bp, Rattus norvegicus
  Genbank Accession No. AI029017
tttttttttttttttttgtggacgggttactttatttcatagaaaatcacactgaggaattgataagtcaagtatactcagcttggattcaccgccacggactccacactggagggtgagactgccagagcctacatgcccagacacatgtgcaaaggaacgcagagacaatctgaagccacgatgtccctctgcagggactcaggcttctcatgctgagctccccacagcccctgccccacagtgctgggtctcagcacagggctaccactttccttgttgagagaatgttgcagtggctagtttggctggaacaacaaaacctcagctccatgccctcaaacactaagttttcagtgaaataaaagc

SEQ ID NO: 418 - DNA, 377 bp, Rattus norvegicus
  Genbank Accession No. AI029126
  misc_feature (1)..(377): n = a or c or g or t
tttttttttttttttttaatgaggctgttttctgtgcttcaagcaattggtgggttatcaactggtgtgcaaaggtcccttgtctgtacacatagcaggattttcatacagcttccccaaggcctcgaggtatgcttggattgatggaagtattcgtgtctgtctgctcaccccaaccccatatacctcttgtctgcctttctactccatggagtcagcagtgctggttggagtctttggctggttggttggtttcatanatggtggtggttgctgcctcgtcagagatgagctgtgcgtgcctttgagctgcatggatccctggcccttctgcactgagacagctcctccagaggtctgggagtgacagcataaag

SEQ ID NO: 419 - DNA, 457 bp, Rattus norvegicus
  Genbank Accession No. AI029428
tttttttttttttttttaaaaaacacaactgcagtttattccagccatgtttcccaggagcagagaaaagctacgctccccggggatagcctgtcggttgtatctactattttgcaagcctgaccttgcatttcgaacacctcaaacctcttgttctgtgcactaaggagaaaaagtatcaaatctatcccatatgtacaactctacagtcaccataacatcactgtcatcgagtaacacttgcccttcagggcaactaaaggtcggtcagctcatgttcctcacactcctcccccatttcctttaggaagtgaaaggctactacaggaaagcaaacattcaaaccatcaaaattcagacaagttatttcaagataataaaaaggggaaaacgtgactgttaggcctgcagagcacagaactgctggaacacagccaggatgtgaggatctaactct

SEQ ID NO: 420 - DNA, 482 bp, Rattus norvegicus
  Genbank Accession No. AI029450
tttttttttttttttttacaattagttcatggtttttattaccctggctgtttacagaaaagtattttccactgttaatttgggcataagaatagctgtttattttgtgacctttttagaagttttaaaaaatgaaaaagaaaaactgtatctgagatcttagtatcattggttttaaaaaaaggacgggagaggcttctgtttcatccatcagtaactccgaccaaacaaggtgtagaacttggcaggattcttgccacagacacacatggctcctggctgcagctcacacagagggttgaaaggaatgcaaaggcttttggctcccatggatggagcaccaggttccacatcctgatccctggccgttgtcgttttgatccagtcttcacagtcaatttccccacagaatggaatctgtgcaaccttcccagaatctagcaccttctgaaagtcttccagtgtatccgatacaaccatgt

SEQ ID NO: 421 - DNA, 323 bp, Rattus norvegicus
  Genbank Accession No. AI029829
tttttttttttttttttgttctcctaatagccagattcttttatttgatgatccatacattttaattcaaatagacaccacaaaacttaggcacagattaagcattttacaagcaatgcattatgccaattttctttgcaattgccaaagagtacaataagtgaactccttaaatgatatacttctgtacataaaatatccatgtattaatacaagtgtatggagcagagtttaaaggtaatcaaaccctaggattgaaataaataggatgtgtccatacagagcagcatatcccagaacactgtgcttggaagtggtcacgg

SEQ ID NO: 422 - DNA, 394 bp, Rattus norvegicus
  Genbank Accession No. AI030024
  misc_feature (1)..(394): n = a or c or g or t
tttttttttttttttttcaataaacaaaactttattttcctttaatacaaaaattaaatagcaagttttttaatacagtgataaattagaaatttacagtacagacatcaatgtagacacacttttgtacatccttaaaaagggggatatatttccttggaaattcagcaatttgttcagggcatggatagcaggggtttgccaggtacctctacactaagcatccgaatggccccaggttgcctccagggttctgcagttactgaaaggcatgaggatccacgtaaaaggcanagagcaactgggtaaactgctgcacaaaagacttctaactgtattttatcggcttgcagactgggattattattttagttcatccttcttatgaagagcc

SEQ ID NO: 423 - DNA, 351 bp, Rattus norvegicus
  Genbank Accession No. AI030179
tttttttttttttttttgcatcaccatgatttattagacaggaatcagcttttcaacacatcatgctcaccatgccccaccccacagaaaggcttcaggagtcaggggaggaagggatgggttgcccacacaggtcccaaccgaagatctgagcaaccagcacacctaatgcccaggaatctgagcttgagtgtattctgccactccccaaacgatccctacaggggaagaccaaacaaatagtcgatagataatcaaggctggctttccttcccctgggaactcggacagcctcggactagacaacatggattgtgccttaggtagccctggcgactcaggcaagaatgg

SEQ ID NO: 424 - DNA, 491 bp, Rattus norvegicus
  Genbank Accession No. AI030248
tttttttttttttttttcaggattcctgcagctttattgacactcatgccagagctaccaagaggtttccagcagccacagcacaaaggccctgcagagtccccatccaataggcctcttctgtggagaccttgtcctcaccctgacccttgacttccatcatcacttgctcctgtgacctgggttccggtcgcccgtcatccgatggtctcaacaggacttcaaagcatgtctaccagtttgaaggttccctccggtttggcaggaaccacgtggacaaaagtcttgtagagcacagcacccttgggcagactagtgaccagattcacagcctccgagtttttgggattgggcacgtagacttctttcgtgtagcgaactatcccctcctccagggcatacaggcacttgttcttccccagtcccacatgggcgcctgggtgccatctgaactgccgctgagtgccaaggatgttgccggcatgaacgta

SEQ ID NO: 425 - DNA, 528 bp, Rattus norvegicus
  Genbank Accession No. AI030430
tttttttttttttttctcttcaagttttattgtgcctcttgcatggtgcagatagttttacagttcttttactataggaactgagctgtgatccaaacaatcaatgaacttattccaacctcagtaaatattcataaccatggaagatggcatagcacttagcctacagcgatgacagcatagacctgggcaggttttcagttatgtccagaagatcatcccaagtgattactgaaagccaacattaaacaaaaagcaacttgtttaaaattcctgattcagtatgaaactctgaaatcctccaaatgttgtaattcccactaaggcatgggatgtattcggaaagaggaacattaaaccgtcttaacacctagtaacaattttgcccttcaccccagccttcaaaaccaaacttgattttaagttttccaatacatcctatcaaaggtttgtaccctaatgaggtggcttatttcaacacacacccgggcttctggtgcaagtcactgggtccactataaagagtgc

SEQ ID NO: 426 - DNA, 394 bp, Rattus norvegicus
  Genbank Accession No. AI030449
tttttttttttttttttacaataaaaataaatctttaaatgttttccagcttatttccctgttcctccgccttccccatgaggtactacttactatgcaagtcagtcaggtctgaaattctgaaattaaagttcaacatggtaaagacaaggaaggcgctctaccctcttgacctccagagactccacagagatagcaacagtaaaggcagcagagactgcctgggtcagactgtaagcagggagaagttgggaggaacagaaaggcagtaagaatgataggaaagaccactgatagactgcaccctgacttcttggagaggtcatggcctcacagttccaccagactgggaggcctggaacggcgagctcatctttttccagtcactagaaga

SEQ ID NO: 427 - DNA, 255 bp, Rattus norvegicus
  Genbank Accession No. AI030472
tttttttttttttttttaacttacaaataagtgtttattagcccaagttgccttcctttttgttggattcataggcatcacagacgacctaaggcatgacacactacatgtttgttgttttgtcaagaggccctgccaactgtcagtgctgggctacatgaaggaccctggtcaagtggcaagattctaatcacgtggtttttttttttttttcaagtacctgccaagttgctgtgcaacccaagatcacaaagt

SEQ ID NO: 428 - DNA, 357 bp, Rattus norvegicus
  Genbank Accession No. AI030524
tttttttttttttttttagcggcagagacgtttattggaatttttggccggaggttgttcatctgaggtgtggcttttcaatgaagccatctcaagtccaaacaggagtttaggaggcagagacttgattaatccactatactgcttgaccccatcccccacacaaggaaagtgtagtgcctagccatttcttgccagtgattacggataataacgtaataataataataatgataaaaaacaaaaacaaaaaaccccaaccccccacaaagcctctgttctgaccacccttcagtcttctgctggatcagaaacgtccaaactgtttaagtacatatgcagttttgttttagctca

SEQ ID NO: 429 - DNA, 447 bp, Rattus norvegicus
  Genbank Accession No. AI030668
tttttttttttttttttaagactgtgtcatatttttattttaagctataaaaacaaaattaggcaaacaaaacaacagaaaaactcaaaataggttcaaatgatgtatattcatcttttccaggaaagcagaaggtaggccctaccacaaagaaaagatgtcattaatggaggttaactttcaacgtacattaaatactatcaattaacgtctgaagagaacctagggtttgttcaccttgctataagcatgagttgacttttgttatgtcattgaaaacataaaaatgccttaaaaatctcagctattaagtatgatcttactggaaattcttaaccacaattttccttcctggaatgatgtcgtgcctgtgcatccctctaaacataacggaaagcacagctaatgcaggcgggcttcaacctgttctaccagctgaaacagctt

SEQ ID NO: 430 - DNA, 451 bp, Rattus norvegicus
  Genbank Accession No. AI030932
tttttttttttttttgtattcaaactagctgcttttctaatctaatcaggttaatttcaatacaaaaaaataaaaaataaaaaataaaaggtgccacctggtcagcaacatcatacactggtgacaagagcaggtttactgagttgtgagctcagactgctggaccttcaggctggccttgtccacctcggtagactgaggataaaagggacctaccagccagttgagaggcgtgttgttaacaaggtaatccataacttcatctaaggactccttcattttctgcagctgccccttgctagaagtgaggacgccatcagacacttccttgaaggaggtaacattgcggaacgccgagtagatgtcacctgccatcacccccaagtgtttggcctggtcttgaatgttctgtggtaacccttggacgttgaacaggaacgtctggcatgta

SEQ ID NO: 431 - DNA, 304 bp, Rattus norvegicus
  Genbank Accession No. AI031023
tttttttttttttatttcatttggctaccttttattcattttattttaacttttcctgattctatcttgaacccaaaaaaccctacccttaaggcaacaagagaaatgttctgaaaacaaaacaaaacaagaaaacctactctttttgatttccactctcacattaaataacaataaacccagtaacccccaattatgcagttgtgaagtcctaagaaaccagagtttaaaactccgtccggagcacaccacacagggtgggttaagttccctaacaagaataccagtgacccacaaagagcaa

SEQ ID NO: 432 - DNA, 457 bp, Rattus norvegicus
  Genbank Accession No. AI043721
tttttttttttttttttaatggtaaatgtttgcatttatttttaaaagcttagtttttactaagcttttttcttaaacaaaagctaataagcaagaattatttttccatacagaaactttatccataaacaagacttaaatttattccaacattgaaagctaaaaaagaactggaaaaattacaaagcaaaacatttgagtcagccttttttctaccatttgaaaatactgtacttagaatggcagacacatactgaaggagacagaaaaacatgcatttagtctacagatcagcattaagagtgacatgcaattcatgatttcctttcaattaattatttaactgaaccacttaaacaaagggtttggtttggtttccacttgacgaagatgatctgttttctgaattgatcttcttttcctactagatacaaagtgtgtgagctctgtcttctct

SEQ ID NO: 433 - DNA, 225 bp, Rattus norvegicus
  Genbank Accession No. AI043772
tttttttttttttttttagagagcacacagtttattaaagagaactcatcaacagcactagcctgctgagctcctgggagctgctcccaactgagccgcaggcactcaggctctgactcctccttcagaatcaagggcagatcctttcctcagacagcacccatctgtggagccaccctacccaagacagtctccatgtccttggccttcatctcaaggacaagt

SEQ ID NO: 434 - DNA, 498 bp, Rattus norvegicus
  Genbank Accession No. AI043805
  misc_feature (1)..(498): n = a or c or g or t
tttttttttttttttttaattttagtatttattgccatcaaaattagcgatttagggcttacacagaaaaatctgccaccatacaatctttcaaaggaaagctgtcttctctatgtgtgagaaagctttaacttattcctgttctaacataaaccatgtttaacaaacagatgcttgaacatgtgccggaatttagattaggcaaggaagttcactccacctagcaagcaagtctgaaatatcatctttgttttttaaaagtttgacctgaattactgaaatctaatggattctcatggtcagtcatatgaatacgttataatcagtaagaagtcagtattgcacattaagcttggaccaactcaagtttcttttttatgagttctttgccatatgtgttttgtgaaaagcctttttcatctagacagtattgcaaagatgtcatagtttatttgtctccacagttttatctacaggagcattgcacgttgcccgtan

SEQ ID NO: 435 - DNA, 431 bp, Rattus norvegicus
  Genbank Accession No. AI043990
tttttttttttttttttagtttttgaaaccagtttatagatggaaaagaaatgacgatggtcatatgtgttgatacattctccaatcccctcatggggaagaaagggacccagagccattactatggtaagtgtacaggacccattccagggtgggaacacccttggacttgacagctcagcctcaaactgggaatagcacgctctaacaataccacactctgcagtcagcttacagtaaggggggaatagattcttccccacgtgtacacaggcaaacctggcacagtgatagagatgtgctttagagagagaaaagtacatcgcaggtgttaataacattgacaaaagttgtagccaagcacatccaaacgcctgtccagcttgaaaatgcctctcagccgtctccaaacagactccggcaagcagact

SEQ ID NO: 436 - DNA, 441 bp, Rattus norvegicus
  Genbank Accession No. AI044046
tttttttttttttttttgggaacatgggaagtattgttggggaacaggcagaggctggaagagtccaaagaggggtaacccaggggaccaagccctcccgctccacacccccatcccacccccaacctcagcctctcttcatggtgcttttcacaggatatgagcatcatgaccccaggcaggggcagaccttctacagctgaccctggcttggagctcactttgtcaggaatctcctccattctcaggcgagccccctgggatgaaggagctgagggaggtgctagagtcaggccagtgggcctttcagctgccctgctccagagttcccagcgaagtcagccccagctcgttccagagcatggtgacaatctgtggagcctgcttctcacctgccctgggagttcagtgtaccaaggatgatgaagttactgttgctaa

SEQ ID NO: 437 - DNA, 474 bp, Rattus norvegicus
  Genbank Accession No. AI044253
  misc_feature (1)..(474): n = a or c or g or t
tttttttttttttttgtacacagatgcttttatttggatgttaatagatttcaacattgtctgcaagattctcttacaatgcaaagtttttttttatatattaaaaaactcaatttagtcagtgtaattgctgtattaatgtgaaaaccttacaacagaatgcagtattggtatgtgtgaagtcagtttccatgcacggatggctgctacctgtatgcttggcatcttcagaaaactgaagaatataagtgaacagtaaaaaaagatgacttaagatgcctaacatgtttatgattacaaatcttgcaaaaagcaacaaagcagttaactggaggattcaaccaataccaacccaaatatgtcctatgtcccataagcccaggcttatggacaatgtattaacatttgtgctaacttaatgctcaagaaaaattatgttttaaaatatgtancgtgtctgagatattttacttt

SEQ ID NO: 438 - DNA, 407 bp, Rattus norvegicus
  Genbank Accession No. AI044338
tttttttttttttttttcttgccaaacatagaactttattatatttctagttgcgtccctttgtattagattcagaatcaagtactggacagaatagctctgaactatgtccttgggctaataaggtttctactccacctgataaactggcttctatccccaccatggtgccagttggaggcacttggattacagagaaacagcagctggcttgaagaggggttttagtctaaaatctcccagtaggaacacagaacagattgaacttgtgttggggaggaaggttgctacataccagagtacgtttcagtttctcaaaccagaggggcacccaaggcactttccctgtccccactcatcccacaatccaccttacttgctgacctccacctctgtgtgtcaaagca

SEQ ID NO: 439 - DNA, 372 bp, Rattus norvegicus
  Genbank Accession No. AI044794
  misc_feature (1)..(372): n = a or c or g or t
tttttttttttttttatgtgctcataggctgtttattatcaagaggaaggagagagaggaggagagagcccagacagccctcagggcccaagggagagtgaacagaaaggctcctcttcctcctcttgccactgacccagaagactccatctgcagagatctcagggtggcttaggggcctccaggaggcgtggcagctctgctgttgactggagatgggatggatccccacagggtcaggtcccagcctcggaatggcttctgtgtacacaaaatatctctcttcgaaaggcactggtggaggtgagcagtangaaggctgccccatcacaagccagactcactgtcccaggtctgagttctgcttcctca

SEQ ID NO: 440 - DNA, 388 bp, Rattus norvegicus
  Genbank Accession No. AI044900
tttttttttttttttttgagactgggtacccgcattgttctgaggaggatctgttctttagtgtactggaaacacgaggttaccagcaggcacaacagggaccctttggaacccttacaaaccagaagggtcacataaatgtactgcatgtgaggtggtgagggaaagggacaaggggaaggggttaagaagagaaatctctggtccactgtgactttcttcagcctggacagttgctcttaaaggggtagctttcttccagtgtactgtactcttcagagcagcagacggctgcagggtgtgcagccagcagcagacgtatcagaaagagtaagtcctaaccccttggttagaaaaacaggagacagaagttttaacacccacctta

SEQ ID NO: 441 - DNA, 495 bp, Rattus norvegicus
  Genbank Accession No. AI045074
tttttttttttttttttgcattcaaattttattcatcagaaagacatgattatttcaagtcagaataagggacattattcaagttttgttccaactcggcacaccagctgtgtattcctatggtatccactctcttcagccttcctggtggccacgagggtgggtggtcaggcaaggcagggctgcagtcaccagcaggatacacacattccacaattctgtaccataagggtggtccacgtagcaagagtagggttgtgtgcccagaggatcagtcgtcgcaggcgggtcagccctgagtcttgaccagactggactggaaaatggccactgaggtcagccaataaccggagtgtcaacaaactctactgttcatagctctagggtcccattactgcagggtgacgactccagttctagcactgtgatgttgtttggggctgaagtggtcaggatgttccttggcacaaacaaggtcatttgtgggccctttgt

SEQ ID NO: 442 - DNA, 461 bp, Rattus norvegicus
  Genbank Accession No. AI045151
tttttttttttttttttccagaaaatgaatgattgcatttaatataagaagcattgacctgaatttaaatgggacagatgcggaaggggcggagccatgcttcaaaccctgacgaggcttgttgtggttccaatcaattttccagccacatccgggtcagtccccctatgagcccacagcggtcacttttgaggtagatgctgatggcttaaagagaggtaggtaaagtccgaacttgttttcaatgcccgcaaatgttgcaactgccagtttatagccccctacgtggtcaggattgggagcgggcagagtaatccgagatttaggaaccagctcagatcccacgggcttcacgcctccaaaatcgacgtagaaccatcgctgcagcagttcgtaagtaagcaaggtgacaccaaactgcggtgaggagcggaagactcgagcaccagctcctttccaca

SEQ ID NO: 443 - DNA, 494 bp, Rattus norvegicus
  Genbank Accession No. AI045477
  misc_feature (1)..(494): n = a or c or g or t
tttttttttttttttttatacacatttttaatgagcatatattagtctagtaagcagaaaaatacaaataacaaatcatgattagtaaaatgtttctcataattactttaaaatttcttagaatgatgttatcactgatttatccaatcttattcatacaaggtatgaagtaacccataagtttgctaacagcataattgagagtttttgcttggtcataacttcctttctaagttgctacttggcatgaaaccccatggattggaaccaaacaatggagccaggcacagaatagatggaatcaacaggaggaaagacaccttccccttcaatgggattgtctaccccgtagaccaatgacccttgagtctgattttctgacttccattttgccatctgaagaatagcaatggaaccaaggtgctcaccagggaagaagggggagcaagtanagtgggggtgggtggagaacagagtctctactggttctatca

SEQ ID NO: 444 - DNA, 364 bp, Rattus norvegicus
  Genbank Accession No. AI045509
tttttttttttttttttaaagtctgtctctcgcactttagtgtcatattagaataatatcaaatgttccgttgggagccttatgtttgaagccttaagataactgtgcttttccaggcccactgccaccagacctataatcccagctactcaggaggctgagacaggaggatccccgttcaaagatggctgcctgggctacagagtgagttccaggccatctcaggcaactcagtgagatcctatcacgaaataaaaaaccaaaaggggactggggacagagttccattacagtaagcttgcctaccactgctggtctggggaggttctaggttcagaccccagtgccaaacacactcacaaag

SEQ ID NO: 445 - DNA, 400 bp, Rattus norvegicus
  Genbank Accession No. AI045608
  misc_feature (1)..(400): n = a or c or g or t
tttttttttttttttttgaaaatccaaaatgttttattttattttttttccttaaatagagataaccagtaaacaattttctgaacttggaagtttaaaaacgtgcatataaaaatgggcattatgtatttcttattgaatgtggattgactgccgtctgctaagaaaagtgggtgtgggggctgaagagaaaggaagttgtctttttttgttttttgtttttttttgttttttgtttttttttttttttaaggcttgcttgtgaaaggaacagttgtaaaaacaaaattgcttgaagcagggtcagcttagtgcttcacagtttgactgcttctctaagaggagcccttcctgcacacgtgcatcagaaaccacagaanacacanagacagacacctaa

SEQ ID NO: 446 - DNA, 353 bp, Rattus norvegicus
  Genbank Accession No. gi|3292445|gb|AI045626|AI045626
tttttttttttttttttgaggaaagaacatgcatctatcaagaagctatactaataaaatctcggaggacacctcattaggaatgtttctctttactgctgagacagatgggttatttaattactcagtgtggacatctgcttagctacctgatgatgggagtaacagactgctttagaatagtggccggctctaaagtcccagggagacctgtgtgagatgggcaatgtgtccccatgtcctctccacaactcagacaagcttgttcttaagcggcaggcacatcagcatgatgcagtaaaaggacaaaggatttgtagaacagcccatggcacgcgcactttagtcaccta

SEQ ID NO: 447 - DNA, 492 bp, Rattus norvegicus
  Genbank Accession No. AI045669
tttttttttttttttttgaagaaaaaaaaagaacttttatttttttctattgcataaataatggtaaattagactctttttttttaaataagattatatatttacagacaagtttagttacagaaaacatcgggtacatatatggcaaccattttccctttatacagtaagataacatgttaataatatcgcttcattgggtcacttaagttgcatgccaagttcatgtaggttaatatttacacttgatataaagatatttttctttatttcactaacctgctgtctcaccacttaatagcagaaaatcaccaactaacgctaaatgaggtacaatgggaaattgagatgcatgattgacatccgactggaacattctggaagaaagaggcaagaagctcctgattagaacagtctttacctgtgcttcagagtcaccctgtgcgtagggtttaaatcccagacatttacatctgtgctttgagaataagt

SEQ ID NO: 448 - DNA, 153 bp, Rattus norvegicus
  Genbank Accession No. AI045827
tttttttttttttttttccaaaaatagagaactttattgtggggccacatgaaaagggctggggtaggggatgtggggccagcccccgaggcctggggatgaggaaaaagttaatacacagtacatatagaaggcacaagtggggaattggag

SEQ ID NO: 449 - DNA, 467 bp, Rattus norvegicus
  Genbank Accession No. AI045866
tttttttttttttttttgaagattgctttgtactttatttacaatagaatgtaagaaaaagtaagttattaacaataataaataacaaggggggggcgggcatcgacgacagaacagccgtaaaaggacacagagggttgtgtgtgtgagggtcacttccgttcgagttgcttgcactctgcgttccaacacttggtccttcagtggtggcagtggtattttgactaagttaacccgatcaagatctcagctcgaaaacggaaatgctgaaatgacactggcaaggacatataacatcaactcaaaagaacctcttatctcctcagggacactgggaaacggggagggagacttgaaattccacagatacagtttgaactcggaaagcaagaaagtgggaaggcttatcctaagcatttattaaaatggagttacagtaaaggggcgtcgtctgttaagttctccac

SEQ ID NO: 450 - DNA, 466 bp, Rattus norvegicus
  Genbank Accession No. AI045882
tttttttttttttttttagtggatataaacgtcttttattcaattttaggttcagagcttggtttactgtccagctgcacacaaatgtcccttttctcatattgttattggttgtgtatattttctttttgcataagaaatatgtctgtttagtccagtggctcctgttttatccggatgacggagggtactcggggtgtccgtctcagttcccgtcggaggacgtattcactgaactgggatgagtccacgcctcctccacaggaacccacaatttcaaatcctctttgctgcaaccgctcgaggacctgaactgagttgaggtggcagtagccgtttagtggaaacctgatgacatgcgtcgagtcgtgattccaacctgcattgacggagttgcacatcacgtcgccgatctcgggaaacacttcttctatcaaggacttgtccccactgagcgtgatccttt

SEQ ID NO: 451 - DNA, 314 bp, Rattus norvegicus
  Genbank Accession No. AI045970
tttttttttttttttttaacttggagattaccaaagatttatttggaatgacacagcactgagaacacaactgttacagatggtttgtggtacagcatacatcacctcgttcattttagaatgatctgtgaagatgagttgcataaatagaatgtgaaagtatataggagcttttgtaaataggttctttagccccctcatacagccaatcatataaaggcagaaatgatgactgcatagttgctggtccatggatttactggactgagcaactgggcaactatacaaccaagccctgctctctccaaaggggc

SEQ ID NO: 452 - DNA, 359 bp, Rattus norvegicus
  Genbank Accession No. AI058503
tttttttttttttttttaaagaacgacttaaaatccagaagaatcctaaagccagcgaggagtagcttcaccagtggaagggaaaagcttcactaagtatctcccaggaacagcactgcagaccagggcagatctcgggtccacttggacagtattaattggatggtcgagggaaagtacttttcagttcccatctgcaaactgatgacaccgatcttctgggaccgggagcggcgccgagacctccgggaagggagcgctagcagctcccgcgccgccaaactcgctccgccgctgcgcgcgcccgcctgcactccttgtcgggtccccgccacgcctcgcgtgccctcctcgtgccg

SEQ ID NO: 453 - DNA, 423 bp, Rattus norvegicus
  Genbank Accession No. AI058509
tttttttttttttttttactatttatagcaatctattagatttaatagaaggtacatttgatctaacagtaaaagggagacagctgtcagtaaaatgcttgctaggcaagcatggtgacccaaacttaatccccagagacaagaaaaaaaaacaaaacaaaacaactaaccaaacaaccaacaaaacaaacaagcaaacaaaaaagaaaagaaaaccagatgtggtggcgctcaacatgtaattccagacgtggagaaacagaaagatgtaggtccctggaacttgctggacatccaatctagcctatttggtaagtctaaggtcaatgagaaagcctgtctcaaaaaaaccaaaccaaaccaaaccaaacaaaacaaaacaaaaaacccaaggtggatcacatccaaaataatggtacagca

SEQ ID NO: 454 - DNA, 182 bp, Rattus norvegicus
  Genbank Accession No. AI058655
tttttttttttttttttgaccgagggacaaaagaaaatttttatttaaaatgagcagcctgggcggggcgtgataccgcacgcctcatatgccaaaggctgaggcaggaggattgctgtgagtccgagttgagcttgggctacataatgaagtccaggccagagtggaatgccctcgtgccg

SEQ ID NO: 455 - DNA, 342 bp, Rattus norvegicus
  Genbank Accession No. AI058759
tttttttttttttttttgaaccatctgcaactttattctggagcagaaataagtcattttctaacaataaatataaaaaaaaataataataagttaaggttccaaaaacaaaaacaaaaaccacccaataacacagatctgtaacactgacagcgacagttgtccaaaggggctaaaaacggggtggctgggtggtaagtctcctacaagtcggccaggcctcagcccgggaatgtctgttgcagggtatcctctgtccccagccctggcaaggtccctgccacacactcattctttccacaagtataaaatatatatttaaaaaaaacctcaacacagcca

SEQ ID NO: 456 - DNA, 458 bp, Rattus norvegicus
  Genbank Accession No. AI058889
tttttttttttttttttacttatgcaaagataagtttattaagattaaaaaaataacatccaggacagaaataaccatggaatctgctgggtgtagcctctcctttataatctcagcacttggcctgagtgagttccaggcagccttggctccatagagaattccagcctagcatttgctaaaaactaaaacccaagccaattaaacaaaagccatcagctacaaacaaaatgacaaccattttctggagtaacaaggttaattaccatcatttagtgtggttccaaattattggccaaatgcaccacctgaaccaacatcaagaagcaccatactttaattatagttagtgccaaaagaatgtttgagttttcctaataccaggggtcatttataaccattttaacttttttttttttttttttttgcaagcacacacgtattggtacccatgtcac

SEQ ID NO: 457 - DNA, 455 bp, Rattus norvegicus
  Genbank Accession No. AI058990
tttttttttttttttttacaattttaggcaatttttatttgtattttagtatctaaacaacttgcagggaatacccttgtggagcaacagagtggttttatttgaagctatttgaaagtcacgacaggctcactactatgttctcaaaagcagtcaatatgtcagccagaacagccaacttctcaatagtcatctgtgatagatacttgactatgtgagcctagagagcctccccacctctggtccccctggagaggaaggggtgtttgtgtgcttttctgtgttggttccactgaattcatcacgatggagatggacatttgaaattcataacggtctaacatctgagcaatcttctttcgagacacgccatgtttattcctcttttctaattcttcagggtcaaacttccaccaagtttccggttcatgaaactctactctgtatccttttcc

SEQ ID NO: 458 - DNA, 402 bp, Rattus norvegicus
  Genbank Accession No. AI059290
tttttttttttttttctccatttatttttattcctcagagaattacagaagcttgttttacagcctctgtgttgacacagagtcaaggcacagtgttcactcagctacatgcaccatcagcactgtgccactaggagaccagactggtaacaagcttgagcatcgctcgcctgcctggagtgccagggcccctctgctcagatggctctgtaggagtgcttcaaagctggtcttacaaccagaggcaccgcacctccggagatccctgtttgcaatctacaaagtataggcatgtgatataaacctgttccccagaagcttcctgggtgacttacatgaacaacgggactctcaacaactgatgtggagcactgccatttcctgatggagctgcatgtctga

SEQ ID NO: 459 - DNA, 324 bp, Rattus norvegicus
  Genbank Accession No. AI060150
tttttttttttttttttaaagtaattacattttattgagtctttaaaaataaaacaacaaccgcctcaaatgctttaagaggctgtttgcacacaaaccccaaaaccaccttagagaatatgaaattgagtagtgtaccgataacttggatcctgctgctgtagtctgtctttgaaagttgcttcagtgctacaagcacttgtataacagggtattggtccatcctggacatggagttcagctactctcaccatcactgctgatgataccacgcatatgagaccagtctggaggtgcttgacgtggccgctcctcatctgagtc

SEQ ID NO: 460 - DNA, 477 bp, Rattus norvegicus
  Genbank Accession No. AI070087
tttttttttttttttttatttggagtctgtttactggaagctttctgtccctgaggatctggacaacagcagcaggcagcagatgtcttattaattcgttgaaggcttggcccactcgacattgaggataagatggtcgtagccaaagccagacacccctgcaatggcacgcgcagcatcctcccggcggtgaaagctgataaaggcaaaacccttggactgcccagtggtcttgtccttggccaagtagattcgggagatggagccaaaaggccggaagagttcctgtaagtcagtctcacgagtgtcctcagacagattagtgacacggatggtggcattgtcatcagctctgcggtttggctgcatagactccccacggcggcttgccccatcccggagactaggaggcacatacttccctgtcttgttctgggcggcctgcacaggctccagttctcctggcaatttctcctt

SEQ ID NO: 461 - DNA, 529 bp, Rattus norvegicus
  Genbank Accession No. AI070108
tttttttttttttttttggcattttattggtttttattcatgaagtagagcttttacttcatcccagcgttttcctcagaggtagactttgatttgatttcaatgagttcttcgactcgagccaggacactttcaatcaagtcgaatgtgaagagggcggaatgtaagaccttaagctgcatctcaggaggcatagtggggatttcttctccgcctacagtcacagaacaaacacttttacacattgaggcagcttggctattttgttggctgtttttaatctctgcttcataatgtgcctttgacatattaagtcctacatgaagtggctgtagaaagttattttcaatctttccaagctctgtccataatccagtttggttgtcatcttcattatctttgataaccaaatacctcaacaaatttagtgaagccataatccggtctgagttctgcagtaaatctgtctcagcgccctcagggagggacaggaccaggtctaacagagaggtcagctgtgcgcctgcaa

SEQ ID NO: 462 - DNA, 417 bp, Rattus norvegicus
  Genbank Accession No. AI070314
tttttttttttttttttctcattttggtttcgtttttaatgcattttgtcagttttcttcatttttaagtcacaaacagcaggcactgaacagcagttccccccgctgctgccggcagtcaggccccgaggttacttgaggttctaggcagatgcaacagctagggaggccccagccacaggcagcttaggagaagtgtgctgcagatggaaggtgttccgggaatccaaggacgggggcgccggggacaagcacagcttgctcccacccccaaaccaggcgcctcctaaacttccctgtctggactcttggagcagccctcactgtggccagccggcatgcagggtagtcctccagccacccttgggagcccaagttcttttccaagaccccctacttgtccctttgcctgctcca

SEQ ID NO: 463 - DNA, 332 bp, Rattus norvegicus
  Genbank Accession No. AI070421
tttttttttttttttttaacgtttcctaatgtctgctttctttgcaactgtgagtggcgatggtcgccagctcagaccaaggcgactgtgcaaacctctgaacgaggttttcctttctgacagaagttggtctatcggggttctttctcaacagacatgatttctagaaacacagcagccatcttgtgactacgaagcaaggagcaatgagattactgagaggaggccccgccctcactgagcattgatacggcactccgttagatataatactgtgttagtcacctgctccaaggttcaggctatgcggataacaagccctcgtgccgaat

SEQ ID NO: 464 - DNA, 352 bp, Rattus norvegicus
  Genbank Accession No. AI070497
tttttttttttttttttaaatactttagttcatatttcattgatttgaccttttgactcaggatcagagaatgaatccagcatgaaaacaagatgaaatgaaataaaacaacaaaaatccccagaaaacagaaacaaactatttaccattgaaatggcatttccctgtcggctaacttccattagtttttattgcatcatttttgaaatgccaagagagtggctttggacgtagtgtttgctgttcaactaaaccatagtgttcaattgcttgcgaccattagctaaacaccattttctgatgaactccctcaagagagaatgtataccttctaaaatgtgtctagcacata

SEQ ID NO: 465 - DNA, 523 bp, Rattus norvegicus
  Genbank Accession No. AI070523
tttttttttttttttttatatgtgactttttaataaaagtttctgccatcatattattcacatccaggtttccacaggtctggactcttcttcctacagatggagatgagactacttcattgaaaaaccagaacgagacaaaacctgagcacagtcaggttgtcttaggcttaagagtttctgggtttcgtccttggaggagttgaggatcttcccaaggcctcggaccacgaatattcttccagttttcaaaagtggagtcctttattttctcatactctgactctaaagttattttattcactttcaattttttctccaattcaggatcaatcttaattgtcacagcatcatatcggatttgtgaaaattcgcgaagaccaaaagaaccaccaacaaccagcaacaacatgggaactccatagcgaagggtcttgttcttacgcagagcgcgcaacacagcgggcgcaaccatggcagaaactgcggccgatttagccgcctccgcagagaccccaacgcc

SEQ ID NO: 466 - DNA, 496 bp, Rattus norvegicus
  Genbank Accession No. AI070597
tttttttttttttttttaaagaaacggtgattttattttctgagatggtctcagcctctcaagcatttgaaatccaggcacgtagcagattggccggctgagctgtatgaaatttgttaataaacagaaacagggaaagcgttcgtgtgattcaaagtctaagtgtgttttgaaagggttgagctagatgggaagtaagagttctgtgtgtatttctgttccatcacgggggcagctgctaagggtggggctcagctggaattgcttgcccagaatgctcagatccctgcttcccatcaccagcacagcagggctgactagaagtgtgtgcttctgatcccagcaccggagatggggagccaaggagcatcagatccttccatggtcctacattctgaggacaatgatgacccctcacctgctgcttggtgctcttgttgggtttgacggagtagtggatgtccttcatggctctctcgatgaggataacggtgta

SEQ ID NO: 467 - DNA, 286 bp, Rattus norvegicus
  Genbank Accession No. AI070611
tttttttttttttttttagttttgaagattaactttatttaggagtaaagcgctgatacagagacagataatgtgtgggtttttttttaaccttttgtttttaatttttaaatcagtgtggacaatatcatgctgttcattgatacaatacagccctgtcctgggtatacaagtctgtgacatcattcactacatgaatttacttcatgagacggcatagcagaataagactaactaaagatatatattcttagtaagaaaatgcctgaaataaacaaagtcacaa

SEQ ID NO: 468 - DNA, 339 bp, Rattus norvegicus
  Genbank Accession No. AI070638
tttttttttttttttttcttgttctcttctttttccccttttcttctgggattatgtcagaatacaactgaatgagagactggctggatcctgaaaaattttgtccctgtgctgttacagcagggtcttggccacatgggacactgctattggctaccggaggctttcctggtaaaattggtgtgaatggaggcctcagtggagactgctgaaagctggatccagaaagatttccatgtccttgcttaacagaatggaagtttgggctcccaccagaagcagatggtgaatctggaacaaagggggtaggtcctacctgccttcgctcctcgtgccgaa

SEQ ID NO: 469 - DNA, 431 bp, Rattus norvegicus
  Genbank Accession No. AI070859
tttttttttttttttttaaatcattcttttaaaagttcacattgagtgtcgcgatttcaagtatttacaagaggaacaacgtgataggaactggggaagtgtgtgctctggaagagaactgcagcagcggatggtacgagcctgtgcactcagctctgtgcctgcagcgcagctcggcaactttctcggagcctagtgatggtcgccatggacaggcttcctggttctgaaaatattttctgcatgaacgtgtgacactctgtcacaaagtcccctttggtgatctgcttgaacttgtcacagatgtctggaacactgctggcttccaatataaattcctgatgttgcttaattaaggtcagagcaacccggaatatgattttggagccttcgttgaacaaacagtcccagattcgtagcaccgtctccac

SEQ ID NO: 470 - DNA, 306 bp, Rattus norvegicus
  Genbank Accession No. AI070944
tttttttttttttttttgtagatcaattgtggaatttattaaaaaaaaaaataagtattatgcctgggcttcataaaatttatacacgaatatatatacagacacaaataatattaaaataaaaatcacacttggtttcacgtggtggtggccctggcaccccacaaacatatgttaacttttcctttaaagaaattgctcggcccaagaagaccacagttaggtaaccactaataaagctgtagccgttgcctgcaacatttcaattcaggtttcaaaaagatataaataatttaattacaaaaa

SEQ ID NO: 471 - DNA, 452 bp, Rattus norvegicus
  Genbank Accession No. AI071024
tttttttttttttttttgatgcatttgaatctttattctacaacacgagcgacataaatacattatcttttaaaatattttctctttagaatttattttttacttcagataaaatatacacaaaatacacttgcaagcttgctgacagagaccccaagaaaacagtgaaccgacaggttatatcaaaccagttatgctagcacgtttgaaggagaatggtttttaggactttgtaaatgtggctaaatgagccaaaacaaaagtgatgcttccttgatgagccttttggagtaaacaaaaataattcaaggctcctggtgaattggttgcaaggatgaaccttccatcttctaggtaaaatggtaagtctactcattcattatggctatacttagcttcatttatttatactttttaatgaaaataaattcattctttggtataatacaaga

SEQ ID NO: 472 - DNA, 354 bp, Rattus norvegicus
  Genbank Accession No. AI071098
tttttttttttttttttatggagggactggttctttattcaaaatgtcacttgtcactattcagtatcaaaacagttgcactacagggttctctttctccggttggaggagtacaaacaagccaggaatctgcagggcgcccacctaacaggctgagaagaaaccacctgaacatggcaattgggtggggacacttgaaagatcagcacaccactagcccatagactgcaaagaattctcacagccagtgggttggccaaggtaacctaaccccccaaaaacaattttatattattttgaaatttaaaaagttcttttttttttttaaacataagctattcaagcctcgtgccg

SEQ ID NO: 473 - DNA, 472 bp, Rattus norvegicus
  Genbank Accession No. AI071177
tttttttttttttttttacatctcaaatatttttatttctttatagaattacacttcaacaaaatctattgttatacattataccaggacagaaatgggaaatgctaccatgacattaccaggaactgaaagtacccagcacaacaatcttatgcactttgaagcatgttagagaggacgatggcaccattggataatgaactactgaggaaaggagagccctggccaagttacctttggtctcttaaaggctcctgagcactactgagacatgggaactctccattactgagttggtgcagtgtccttctctctagcttcctgatgagatggcatctaaagggtctaaaggttcactcggctcccacaaagagaagggaacacttagctgctgcccctctctataggcacgaccgtgcagcacttcactgcccgctgaactactagcattagaagtactcctcgtgccgaa

SEQ ID NO: 474 - DNA, 555 bp, Rattus norvegicus
  Genbank Accession No. AI071185
  misc_feature (1)..(555): n = a or c or g or t
tttttttttttttttttgttttaatttggactttattgaaacagcaaaaacataactaatgttttgtggattgttttttaaacaaaattgaaatgaaaaacatcacaaataaatgtcattaacatttctggtgagaaatccagtgacaggaaaacataaacaatactgagcaaagtcttctcccacctagactattcaagatactgcctggtcctgggttgggtttagccatgttttctaacaaaggcttctattctgtaaagagaagattggacagcttgtgtagaacattcatggttactattactatatgttctgtggccacatgcacttaacagccacacatgtgcacaaagtcatcattcctattaggcttagctaacaacaagaaaaaagaatacctttccaccttgttctgcaatgtgacaagcgttaagaagagggaaccaatgtatgtgttcagccattccatatagtcattcctttatggcactttccaggagttaattaaaggagcgccaagatctgcangaattcaagccttacctaaaaata

SEQ ID NO: 475 - DNA, 547 bp, Rattus norvegicus
  Genbank Accession No. AI071251
  misc_feature (1)..(547): n = a or c or g or t
tttttttttttttttttaaatttttcagcttgtttgggctttttcttttaataagataacatgataaataaacctgcttctgtacagctatttaatatttcagaaatacgtacatgttacatgccaagaaacgaccctggttttcttgtgagaaacaaggtgagaccataattggaaaaggaaaaccccacaaatgagaaaaaccaacaaagaaaacaagatcaccaatacacaactaactacagttctgtaactacaccgctagccgcgcataacacgagtctcaaaggaggggagtgcggagggacacacttgaaggcaggaggcccctgtcccctcaaactgaatgagaaaaacaaagtcaacaacaagtcaacattgcttaaaccagtggccacacagtaaaaactgtacattgttgtccattcatttaaaagcaaagtcactaggatgattaanaaaaaaaaagtgagaactggtgcctttgaactttctgatgatgaacacttttactcagagtttgacaattatctccactctccctgca

SEQ ID NO: 476 - DNA, 515 bp, Rattus norvegicus
  Genbank Accession No. AI071509
tttttttttttttttttgtgagcacaagggtaaaagcaaagaccaacaatgaatttgcagcatgtggagttcacaatgcttaatgaacaggaacaacttggctcttcagaatgaatcaattaggtgaatgggtaaaaggtaagtaaaacatatggaagtttccctatgcctggtctttcttgaaccagtcatatttacaaattgaaatgtttatgaaacaaggcaactccccatgtggcatgggagacaatgcaggagatagagctcctgctacaacttcctctagtaattaggaagctatgtgtctctgttagaaggatgttaacaagctcctgcagtttccactctagcaagaaatcaaagagacccaaagcagacagctcgcttcagtaaaaggattatgaagtctggttattaaggcacagacagaatgcttgaccacagttctctttctgaagagactttctaaaacaattagcttctagggccagcaggatttgctaactgaagagcaa

SEQ ID NO: 477 - DNA, 498 bp, Rattus norvegicus
  Genbank Accession No. AI071578
tttttttttttttttttaccctaaagcttgcatatttattgaacaaatacgactaaaatagctaaaatacattgggtacttatggaaggaccacatgttacaaaagcctgcgttttcagcagcgtacaactgcaactctacgtaaatgccacaaatgcacaataccgtttccttgctctatttacatagctgatatatctaccctaacagaggtgggggtagggaggatgcacaagaaactcaggccagaggggaagcaagagagaatgagagggacagtgcatgcgtcattggtgtctaacagtcagaagcgcaaacagttcagaacaaggcctgccctgtcaaaggaagagctaaagacgttatataaaaattaaggtgggctttcagtccggctaacacaacaacattccgtgaagagacggcattgtcagattttatttttgtttatccatttcattgggagcaaggacaaaaatgtaaaatctataccttgct

SEQ ID NO: 478 - DNA, 533 bp, Rattus norvegicus
  Genbank Accession No. AI071581
  misc_feature (1)..(533): n = a or c or g or t
tttttttttttttttttaggattctagggtttattggcattaattccttgacatctgtcactcattcacaccttcaacactgaatcagatctgttgggacagatctcatcccaaggatgagagacaagatcaaaccaccatagccaagcaatagtatcttcagagaacattcttcagagatgtggaaagatttgtcagtaccagaaccaagtcacagtggcatgatgttgcttgtctgcaattccagtacttgggaagctgaaacagaaaggctgacaactgcaggacagcctggccctcatgagtaagggccaaaagtaaagcagagaagttaaagagaaatggtttttatacattttatacctgacacattttccaaccttggntcatacttttattgtttatatttgcttcagaacaaggcatatttcagaaattctcactccaagtcacagctgcttctgttacacatatgctgtgttctgacacacatctttttgtgccagagaattttcttacaagtaagaagtcat

SEQ ID NO: 479 - DNA, 316 bp, Rattus norvegicus
  Genbank Accession No. AI071586
tttttttttttttttttctcagtttggtcattttatttttgaacctttgggaatctgcttcataagcctggaactcagcaccataaggttgcaaagcaccatgggtaccgcaagtaaagtcagctgagactccactttggtgcggtccaggttccacagggcattgaagatcctgtgcgactcgctggtgctcctgaggacttgtgtgatgaaggtatcccactgcaacctcagctcttcctgaggatggctcttgtaggccagggagacaggccccatgtagaaatgaaaaaaatccaatgagctcctcgtgccg

SEQ ID NO: 480 - DNA, 244 bp, Rattus norvegicus
  Genbank Accession No. AI071639
tttttttttttttttttccacagtgttgccaatgccatacattctccaggggaaacatacctttgtcaattgaacaactactacgaattcttaatgaaattcattgtcccacatgtgccacaaatatgtcccgatcatggtgacagccaagcccgtccgtcctctgtcacttccagaaaccgtctgtgacactccctgacaaagagaggactctcgctctttcaaaagtcagcattgatttctg

SEQ ID NO: 481 - DNA, 372 bp, Rattus norvegicus
  Genbank Accession No. AI071646
tttttttttttttttttcagaccaaatgatcaattttattcaagcacaaaaatgacagttttcgtttttcttcatctctttgatgaagaaacaccattataagtccaaattggttttggaagcagaggtgcttcttagagaaccccaaagaatacattgctcacagtttttgattttaggattcagctttctttcccacgttattgacactgagggatacctgatgctgttttaatagtgaaagaaggcactaaagaacggggagaggctgagggcaaatgggaggggcaacggatggtgcaaagacccatgacaggtaaaaggagaagcctggagtcctgtatgtgagcacgaaaatgagccctgaagttc

SEQ ID NO: 482 - DNA, 291 bp, Rattus norvegicus
  Genbank Accession No. AI071943
tttttttttttttttttgcactctttatttggttaatctttaatgtcaatattcttaggtccatttcatcttgattgataaagtgaatcacaaagtaatctttcagctgccagaattttagaaacagaggcatggaagacggctgaatatgcacaatttgaacaatgcatgaatctatttaacaccccttctcactatggcagtccaaccctgggctggacgcaggaacttctaatccagaacgtatatcactccttatgatggaacaaccctgacgagttatacggagaa

SEQ ID NO: 483 - DNA, 450 bp, Rattus norvegicus
  Genbank Accession No. AI071965
tttttttttttttttttggcaagttcttttgaagtttattttcaaatagccagtaaaaattgacctgagttcaggatggttatgtaaaaacaaaaaacgtgaactaacagtggtggtgtaaactcatctccgagttcacacactggggaccaagtgcaacggccaggcaagattatacagggaaggagaacaagagtctcagccttcggtgagccaccatgcaaggaaagcaacagagtgtcaaacgggagaagcaacagagtctcagctttcagtgatccaccggtggcccctgagctcctgacttaacagtgcctcaacactgtcgcccaggggagagtccaaacacaaaggaactcaacagtgtcctggtgtttttgtaacacacctcttgctatatcaatatagctctgactgtcctgcaaaagaaataacttcagagggggggca

SEQ ID NO: 484 - DNA, 276 bp, Rattus norvegicus
  Genbank Accession No. AI072068
  misc_feature (1)..(276): n = a or c or g or t
tttttttttttttttttgaaaaatatgtaaatatgtttaatttttttcttagcaaaaaatctttctaaaaataacaatgaaaatttgtctcagtacaaaggctacgtcactattgaaaaaataccagcatgggggaagggcgcgtgagcagtanaaaatgagctgagtcacaatgtctaaagtctgaatgaaaataagtctgcaataaagatctatgccttttttcttttctttttttttctattttttatacaaacagtacaaaccctcgtgccg

SEQ ID NO: 485 - DNA, 419 bp, Rattus norvegicus
  Genbank Accession No. AI072107
tttttttttttttttttgctaaagaaaatgattcttttatttttcagaaaggagaaataaatagtttttgcttccttgcttgtagattcagtagaagcagaattgctcataagcatggattagagtgatatataatcatccctttttgagaggacccatcctctatactcttttcatgcagtgacttctggcataaagcacaacacagacctccatgttaatattcatccaaaaatggaaaatcagggtggccctggaatctagaaccactcatgtaacggatatttttatttaggccatcaaggactttcatgtcttctgaagtcaactgaaattcaaaaacctgcatattctcttttatcctcttctcagtgaaactcttagccaggaccacaaccccacgctccagctgataacga

SEQ ID NO: 486 - DNA, 315 bp, Rattus norvegicus
  Genbank Accession No. AI072189
tttttttttttttttttccagaacagaagggtactctagattagcccacctagttgcacagacaataaaatatcaatcccctgggcagcctggtcgttcttgaagagaggtttgcagaaaaaaacgaaacgaaacgaaacaaaacagggattccttcctcccagggaaacagaagctcagggaggggatggggacctgctcaaggcaagcacagaaatgtctggactccggaatctcatgtgtctccaaatggtctgagaggacctagacccctgaagaggctgacacaggagcagtgcagtgtgagagagagat

SEQ ID NO: 487 - DNA, 443 bp, Rattus norvegicus
  Genbank Accession No. AI072362
  misc_feature (1)..(443): n = a or c or g or t
tttttttttttttttttcggggtnaaatgacttttttattctttgaacactccatacattagtacaatgcatatcgatcatatccatctacctgctcccaattctccctaatgttccactccatctccttcctacctacaggtactccttttatttatttttttgccatcagtaacctccccagtctaattggtactgcccatctgcacatgggtatgtagcatctactggggcataaacaactactgctagaggttaaagaagaacaattctccctgcctcatcagccaacaattgccagtagctccaccagtatgggtgggcctcaggagtttcctcccatcctcactggaattttggccgacttgatcttgtgcaggtagccaaagatattgtaaattgatgccaacacaagtcatgtcatgtctcaaagacatccccta

SEQ ID NO: 488 - DNA, 501 bp, Rattus norvegicus
  Genbank Accession No. AI072439
tttttttttttttttttccattctgtattttattactgaaatacgttgtcttacccaacccacccaaaaataaaaatcttacccttgtcctctaatctttcccttatccccagtcccatccccggccctgcacaagtgccccggatttcctgcccattggctatatcggagtgtgtccattatgtagcaacgtggaagcctctgtggagagcacagagtgggtgaaggacccttaaaaaggtgctcatttgagagccctggccacttgctcataggcagaaaacttggcaaatatgtccagccccgaggtgttggattcggggttcagagcagccaactttgggtacctgggagggcacagcacggcctccaggaactcctcgattttgttggtatctgtgtgcacttcggtgccgtagagcaagaacgggagctgcccaccggggcaaagcttctgtaccgtctctgtccgtctcttggtgtccacggtggtaacgttga

SEQ ID NO: 489 - DNA, 333 bp, Rattus norvegicus
  Genbank Accession No. AI072634
tttttttttttttttttggagtctaaacttttattggtccctcagtccccaaggggttcccttcttctgagccttagtgcctcagaactctggtatcattggtctcggacaccactttgccatccacgaccttacgggtagttgtcctctggacagtttgcatggagttgctggagtccagggcgtcgttgagactgaaatcgtccccatcctccaacaagcggcggtaggtggcaatctccgcctcaagcttgaccttgatgttcaacagggcttcgtattcctgggtctggcgctgtccttctgcccgagtttgtgccagctctgattcca

SEQ ID NO: 490 - DNA, 438 bp, Rattus norvegicus
  Genbank Accession No. AI072675
tttttttttttttttttagtattaaaaaccattttaaataaagttatcacatttgcagtaaaactcacttgtcctgcctcaaaacagaaacacttgaaattaaaacataattttaaaaaaatcatgagcccagaatgggcaggctggaagctggtttcatcctttggaggctccaggagctttaggtccatgttgcatctgtggtccctacagcatggccacctgcaggctccaaagagcagaaaccgcccctgatgggatccccgctagcctcagcaggaagtgtccaagcctcttgtggggagaggagcggactacagagcacctggcagcagggctcagtcatccaggtagtagtccagcttggtgaacacagtcttgcagcccttgtcagagaagaccttctcctccttggggaagaacgcctcgtgccgaatt

SEQ ID NO: 491 - DNA, 281 bp, Rattus norvegicus
  Genbank Accession No. AI072746
ttttttttttttttgttaccaggaaaaaaatttatttaaacccaaaataaaatgacaaaagttaaaaaaaaataaaaattatcaaaaggaaataccaccattggccctaaaacattcaaacggggtcatttttcgggagtcaaaaacatttattaaaaggttatacaggaagcaaaaatacagaagcaacccggctaattaaggaacctgtaaaaggagggtacactaaaatacggtaaaaaccaaaacaggaacacaattttaccaacctgtctaaccaa

SEQ ID NO: 492 - DNA, 425 bp, Rattus norvegicus
  Genbank Accession No. AI072886
tttttttttttttttttacagagaaggtgcagacattttattctgacttaagagtgaccacaagaacgtccaccttccaaagggccaaataaaaatagacctttacaaattaaaaaaaggtaccatttatgtacacagtgacatcagctaatgctaccatacaaacagacagtatgaacaaacagaaaggaagaagctgcagctggacagacagtcactgaggtccacaggagctgagggcaacactccacatccacacggctgggccaggagggctgtgctggcttctccggaagctttcttgtcaccaaggtccgcatcaaaatgtcacatggctagctgagtcaagctaatgtccgttccagctggaactgcttaacaaagtcacatgcagacatctcataaaataccaaactcccacagca

SEQ ID NO: 493 - DNA, 459 bp, Rattus norvegicus
  Genbank Accession No. AI072934
  misc_feature (1)..(459): n = a or c or g or t
tttttttttttttttttganttccagatgatatttattattgaactaattagtgggaaattgggccaacaaataagacagttttgagctattctgacaacattccccataacgattaaaactttgctcttgaagagtaacgacaggagaattatttcaacatgagtgaataaggaaggtgtatgcctatgtataacacgatctgactacacaaaacatgacacacaggaaccatcaaaggcatctctgtgttatattataatttttcttcacatattgttttcatttctaaattttttacaattagtatatattactctgcaatcaataaaaatagacaaaataaactattgattctatagcatttgatttcaatgttaagtccagatgtataaagactgccacagcagaagctgatcattcatgaggaaaaccataccacatcaaagatgaagactaa

SEQ ID NO: 494 - DNA, 455 bp, Rattus norvegicus
  Genbank Accession No. AI073021
tttttttttttttttttgaagaaaagtcatttattaaatagagtccggttaggatctccttcccgttcatggtgcatggcctccttccagggatgggagtcgggtgcactggaaccccacaggaaactttgaagtatccagttctagggaattatagccaatattctgagagagcaagtctgagatgagagccgagaattgcaagtgttggacaagcagtcaaggaaactcctcacctttggcgaaacctaggcaggatggcaggagcagctattctgcaatggccgctcacctgggacataccactctccttgggcaggatgtgaccccatgttgtcccccagactcctctcctccttgcttctcttcctttcctgtcaagtctcacctccctttctacatctcagttctgtttggtgttgacagaagtttgaatgtcacaatactgcatgtgt

SEQ ID NO: 495 - DNA, 538 bp, Rattus norvegicus
  Genbank Accession No. AI101113
tttatttgtcaacgaaggctacacgggatcacttctggttttgtttttatgctttttccccctttttttctagaaggtatctacatctgcatttatttacagccttgttggtatttacacagtcaagaatacagtgttagaaacacaaaagtattgagaaaaaaacttctcaaaattagttccagacttcaggaaaactatttccacatggtaaggccagagtctccagtgttagccatccagaggcagctcacaatcgtcctttgccggagctgcaggttcagaagtcctcagaatgatgggcacatttagaacagtggggttctggtgatgagtggattagagctgctggggaccaccagacatctgtgggtcagcttctcctgggacagctgagtcatccctgaaccatcagcccttagaatcaatcacatttttcttagggactaggaagtagcccggtctcacgcctttggcattccccagagggtaagaaatacaacacggggccccaccaaggccttcgaagcacaacgca

SEQ ID NO: 496 - DNA, 374 bp, Rattus norvegicus
  Genbank Accession No. AI101256
aacaatcacataaggaagcatttatttgaggttgaacatgaagtcacacaaataaaaatttgtataaacacaaatccacattgagtcataacacagggaaggaacaaaggacagattaacaaaggaactaattggcagctatgtacagtgggacacaattgtgtcatgtacactacaaagtctttacaaaataatcatcttaggtcaacagaagatcaagcaaccttcaatgtcgtcctgtaagatggtttctttacacctcctgctctcccagcgtcctcctttagtagggctggtaattgttctggtgattgccaccccctcgggatgccttgccataagtgctctgctgaccgctgtagtctcctcgtgcc

SEQ ID NO: 497 - DNA, 485 bp, Rattus norvegicus
  Genbank Accession No. AI101660
aatgaagtagacatcgtttaatttacaaacagcagggtaactgatattcgtctggagaaagacaaagcagaccgaattatacacgtacatctaattttcattgttaaaggtgtttttcctttttaaagaaacatctgcttcttcacaggggaccctgggattttaatgaaagaagagcacagtccactatgtcattaccaactctacattggaatttagcagcaaacaggttaacgtgggagcggtaaggtaataaaggagttttattgtttggagagaaattacaatttttgacataacagtctttcttctcccacccttccccaaggcatgacagggaaatgttgtattaattaatttgtcaaacatctacttcttactgggcactgctacagataagttcattcttcctgtgaggacctgtggcagatggatacacttgctgtttctactctgagactttgcaagcgttctgcaagtgtcct

SEQ ID NO: 498 - DNA, 595 bp, Rattus norvegicus
  Genbank Accession No. AI101901
  misc_feature (1)..(595): n = a or c or g or t
aagccatagaagaatatttattgatatgggaaaatgttaacaatatacttctatatgaaatatgtaggatacaaaacagtatatacgatttaataccatttttacggaaagaaaaatagccatatatacaaaatcatgcataataaaaaataaaaactgtatacaccattcatggtcatctctttagtggactggatgtgattacaattcactggagtgattacagcatccatcactcgcctgccctgtaaacagtgtctgcttcatctgtcctgtgattagtgcttccaacagtctgtctctgacagacgccttcccaagcagcttctccgatttgctcttatatactggcatgtagagaacatttcaactgatataatatagagattgccacagcagatgcctggctttagaaagttatttggagaactagaaaattctctacataggattttctctaatagagaaaaatatgcattgatggtatgtgaatacgtaatttcaggagttagaactgaagaatttaggatctncccttccacctgcagtgaaagaaggttaaggatctcaaccccataaaacgtgattagtaatc

SEQ ID NO: 499 - DNA, 431 bp, Rattus norvegicus
  Genbank Accession No. AI101999
cctgtaataaaacgcagcaaaactaatgcttcacaccacacaattaaaagccgtggggctgaaaaggaggagacccgtacgctcactggagacagacatgcagattatgctcaggtcggtgctgaaacagcaggcactttatgtgctaaacttaaagaccccaccagccccaaatcccagtttgctgaaaacagcataaatctgtattagggttacttaaaaccaaacacacaaacacagcttctgtgtctgcaaggggcttctggaacagcagggagggcaggtaggagaggaggggtggggctgggaaggccacagtcgggatgtttccagttccttccacgtgctaggagaggatgctctcacatgcagagtgtagacctggctgaggctcttgtctcacatcatggaagatgggttcctgggcttat

SEQ ID NO: 500 - DNA, 544 bp, Rattus norvegicus
  Genbank Accession No. AI102023
cagtacataattattcaaataaattttaatgatttcaattcaatacaactgaaaatgtagtgtcattaaataacattttctgctataattcaaagtacagtttggaggccatttccgggcagaagcatcacatcctaagttttcagcttaagtgaggtgactgacggggtcatggcaggggcggggcaacaatgatcagctcatagaatttggcttggtgggcaggggccccgcctcctcgtgctcttcagtctgagacctgacaaccacgagggaaggagctggatatctgctcagcttttgttcattcataaactccaagtcaccatagatactcagcttctcagggggcacgtattgctccacggttgtagccacagctgcacagcaaatccagagcaacaccattaccgagagcaccagagtcgtagttaaaatccacccagagttaagagacagacatcttaaaaagccatcgctttcttcatcttccaagtatttcctgtgtgcttgggagtttcttaatctgtaaataggacatttg

SEQ ID NO: 501 - DNA, 536 bp, Rattus norvegicus
  Genbank Accession No. AI102505
gagcaaggtttaaatagactttattgttacaaagggggaccccatcaagcagaaccaatatatgtggtcccagttgtcaccatggagacatcgagaggtcatgattgcagaagaggtgactggaattgaataacatgatcccagggtaagccagccaggaatgcaggaaacatgatcaaggtgggctggcaagagtggtctagtcaaaggatgagggaagacgctcccttcactcccgcttcttgtagctttccaggtgtgacaggacccagcccgcaggtagaagacaacacacgaagcaggaagtgagcccaatggtgatatccaggaccccgagctgctcccgcggcggcttcgagtggacctgagcccgcggcaccataagccgccgggccgggccggtcaggctcctcagcagcagcggcgtcagggaagacatgacggcgcggagtgaccaaggacaaggaccagccgaagcccaaggtcaggaagtcaacctagtgccgaattcttggcctcgagggccaaattcccta

SEQ ID NO: 502 - DNA, 631 bp, Rattus norvegicus
  Genbank Accession No. AI102519
gctccgtcttttatttggggacagaaacggtacaaggtcagatatctcccagagggcactctgtggatatttattccagcgggagtcctgatcccagggagggtttgttgagtaagcgtctggaatgagtggatccgggcatcaggttgttggtgggcatagggtgggttcatctgtaatactgcctctgtgtgttgaggtcactgtatacttctggcctctgaccctgaagctcctgataaggtgactcagtctcagccatgtgctgtttccgggtcccgtctgcagtccctcggcctcgagagaccaggcggcccagagagtacaccgccagggcgatgagcagagtcagcaccaagtcgcccagcacaatcccagccagtacacccgggctcacagaggaacattcgcatcctgggtaattgtctcagaaggatgaagagggagacacaggttaacaatcagggctcggcgttagcagagagagagagctagaaggaaaaggggtagcctgaggaaatcttgagaggaagagagaaagaccaggggtgttatggcttaccactctgggcctgtacgggacttaatcctcccacagtcaggaggacaggaaggaacagaaagccccagg

SEQ ID NO: 503 - DNA, 405 bp, Rattus norvegicus
  Genbank Accession No. AI102562
ggcttttattattcacatgctcggtagaaaacggggtttagtaaactgggtggaggtgtacggcaagactctgagttggtccggaaattatttacacctgagggcagcagcactgttcgtcacttcaggcacagcacgtgcacttgtccgaggcacctttgcaaacacagccctgggcacatttggagcagcccacggggcagcaggagcagcagctcttcttgcaggaggtgcatttgcagtttttgcagccgcaggagctggaccaggtgcaggagccgccggtggagcaggaccagttggggtccattccgagatctggtgaatctggagcaacggggtaagctacaagaaggcagtccctcgtgccgaattcttggcctctagggccaaattccctatagg

SEQ ID NO: 504 - DNA, 531 bp, Rattus norvegicus
  Genbank Accession No. AI102618
gggggggaaaaggtttattttttcctcagaagaaacagactggggaacatttacaacccacattaacttgcagttggtcctaaccctttcgggaacaggtgttaaaatgttaggtgctctacggaatgaaggtgttcaccccagacagaatgtacatggacgatgcttgaagactgcatgttttttccctgagagacgtgtaagacaaacagaatttgctgagagccatctttccaaacagcccctccctcttcacactttggaggatgtgcctcaactattcatctagtcagcactcagaccacatgctgctttccttctaaatcaatccctttcccaaccatttgaactctccaagtcttcatagccctggaccgaaaatacctactaagatcctatctgtacttcagctttcacaccttgtgagctgggaagtcaggctcctagtaaacaaaacttccataactggattatgaggccaaccttttagttaccttaacctatagggtttattcaactacataaagtgct

SEQ ID NO: 505 - DNA, 522 bp, Rattus norvegicus
  Genbank Accession No. AI102620
aaacaccaaaataggtacaaatactataaaattggttcaaaggggtaaaaattttaattaaaatatctcgatatatttaaaataacaaaggatacatttaagccaaattttcttaacccagagtttttttttgtagcatttgcttacatagtaaggtgctaataggagttagcccttaagccctggaagtcttaggaatcatagtcacacagcacatagaatttcattgtgagagtgaactttggtagaagaaaaatctataggacacctgaggtagtagaaactggaataaacagcagtagacgttatttacaacttgagtaccaaataacattaaaaacacaaaaataattacacaatacaattttcagtccagctttgatccaaagaaaacaagaatatcacatcacatttgcatcgaaaacaaaacagcacaattaccagcaagccgaggggactgcaaacaaactcaaacacggtgggtcctgacatctggggacagtctgagtttgaaatgtggca

SEQ ID NO: 506 - DNA, 575 bp, Rattus norvegicus
  Genbank Accession No. AI102727
ctaaaaactgtaggctttttattcagttaagaggtagacagatgaacatggaaggctgtcccattgaatttgcccaaagttcccattccacttcattcacccatcccacactgccagaaatctcaaaagaataaccacaaccaccaggctttgtcttcctacttcttagcaacacgtccacgaactgtttgcaaagaagttactacaaacttaaattttcactgtgccaaagattctcggccctctaagaagttgtcacatgtcaacagaacctgccactagtgacagggagcagagtgccgtgactatttctatgagagactacaagggaagcttcagttacatgtttgttaaatccctgtgcacgctggggaagaagctggtgaggccaacaaagcagtatatgccatcaaatggctctgcttggctgtttaaaaagaatccacattaagttatctcacagacgacattaaaacataatggaattgatgcctgatacaaaagttgagaaatatgtacaggaagtcatagcccaagagaaaagggaccttagaatgaatcaatggaaacctggc

SEQ ID NO: 507 - DNA, 503 bp, Rattus norvegicus
  Genbank Accession No. AI102741
cttcttctcttagacacagtgtacacacgacagcctacacatggcacatgatttagcaaaataaaacattcacgatatgattgaaataacaaagtgtctcagctacataaatgactttaaattatacagtaagtgaacaggagaaagaaacaaagctatagcttattgaaagcgcaaaaacggctctccaatgatgtgactttacgaaagaccttccttgcccaggacttctcgccaagacctcaacagccacctggggccgtggttctgccaatggttttatcttcaggttaacttcaggtgcctcatacttaggcctcacctcaagtctgtccgggtaggagggaggctgatcacacagggactgagaatggccagagacttcttgggaaagaggctggggtgtacatacgggagagcattgagcagggtagatcaggagcgccatattaggagactctgaggttgaaagagacaacttccaacagtaagtcagaggttta

SEQ ID NO: 508 - DNA, 587 bp, Rattus norvegicus
  Genbank Accession No. AI102750
ccaagtaaccttaatttttatttaaataacctccagtgagagcacagttaagactaaccatttttctcaccccccaatacacctcacaaggaggtatgcggactgcctctcaatggaagcggccctggcctctgccccggccagctgctggagctggagcatccacagtggagcgggggttcttgatagtctcatccacagacacaatcaggcacgcagcctcagaagctgctgtcagagcgttgatgcgcaccatggctggctcccacacaaatgcctggaagttgtcagcaatgtcctcgttgttgatgtccaccccataccacatgcccccctgtgcatgtcgagcccgcagtttgttgaggatgtttgtggcatcaaagccagcgttgtcacacagctgtcgtggaataatctccagggccttggcatatgccccgatcaacatttaagagggcaatcttggggttcttatacttcttgggctgcatttcaaacccagcataagagaacgtcttcttgaacgcaacaccagccactagtcgagactcctccagggctccaccctgcaccttcttcctcgtgcc

SEQ ID NO: 509 - DNA, 700 bp, Rattus norvegicus
  Genbank Accession No. AI102753
tgtttatttccatctttaatactagtccaaaacagactgatacccatgagcatagtttaaatgtaacaaagaaaagagttaaactatatacattaaggaaaaaggaaagaaaacctttttttataccaaccttttcctattaatgcagtttctgattagaactaaacatgtctctttctcaatttaatttaggatgaagtaatagaacttttatgatcaacttcataaactgtctttaaggagaaaacgaatttttaagtgggtgtcaccatatttaccagtgaactggctgcatggttgccttgtctccttgaagtctggctatcattagaactaacaagatcaagtccatgaggccctcggggaactcaatggctgtgacatccaaggggagggcacataccatacatcacaatgatgaaagttaatgctcttaccctctgagtccatgtaaaaaaacttattactctcattcaaactaactgaagtcaaacagttaaaaagtcagaatgaagaataaaactattttcttttcacagagaggagggacactccttcagctccatttaaagtgaattctgtgctgagtccctgctccttcagaacagtaaactgaaagtcagttattgctagcaaagctccagtggtctctttcctacctcaaagatgttccacacaaaaaggctattggtttgacttg

SEQ ID NO: 510 - DNA, 496 bp, Rattus norvegicus
  Genbank Accession No. AI102849
gaaaggcatggatggattttatttattaccctatatctacaatctgaggtaaaatataaggaacacataaaatgcctatttctgctaccgtgtgatataatttcccatggtgaacatcgtggtgacgctactgagagcggtgccctcacaccctctaactgctgagagctgctgccttatacagtggcatcgtctgcgagctcccacgtggagccccacagagggcgaggacaccaaggtaccccactccccaccctggcaccgaggccagacaggtggttagagacaaccaaccaggcagacacaaggccagcctgactccacccagagcaccccaggtcactgcaggtcctggtggttagggagggttgagtcatccagctgctcaagcatgcacacctgaccactggcctctgaccttctggatacgcccagaaatttacttgctgcaaagtaacctcgagagagactccgaggtcagcctctccagttgcac

SEQ ID NO: 511 - DNA, 540 bp, Rattus norvegicus
  Genbank Accession No. AI103106
aatagtaaaacagccttttatttgttaatgttgataagaaatttaagcatgttacactatcttaaaaacctcaactagcgcacgtgaagagaaagtctcccccaccctagcccgcctgccccattcccctcaggaatcaagactctaagagaaggagttgactgaacgacggctctgcgaaacgtccatccagagtgcttacatgatggctggcgcaatactgccttcctacaaaacgtttcttctcttttctatttaaaaaaaaggtaaccttgatcacttattacaaaaaaattccatacaaaagttcatatattgaaaaacgcctttcccccctcccacacagcaccattttatatatagcagagaaggatcaagagcagatcgcctatctagggagagcgatcttcaattatgcctggacacgcagtggttttcttaccctccctgttccctcttaaaagaacttaaaaaaaaaaaaaattacatacacacattcaaaaaagaaaaaaaaaatgccaaaaacttgagggccccttt

SEQ ID NO: 512 - DNA, 498 bp, Rattus norvegicus
  Genbank Accession No. AI103224
acgcgatcatcttcattttatttgtaccgtatttgtaaattgttaatttccatctctgttcaggtccgttccttctatctccctttaaagtctccagagacgagaatgagagggatttgatcttcactaaagtagccacagtcttctcagcaagccccgtttccactacctatcccctagctccccgccccctccccaaagcccttttcagggccatagcaccagcgaggatgctcatctgaccacactttgaccacacggaaagcaggaacttaacactgggcagagctgattttgtgaggtgaacaagatgttggcggtggcaaggaatggcgacagagacaaggtggagtgcacccttcccacacacttgccctggtaggctgtctctaggtcctcagaggcgataaggggttccttccccaaccactactgtctcgccattgatgtaactggcatcttcagagcacaagaaggaaactataccgacacaatcct

SEQ ID NO: 513 - DNA, 441 bp, Rattus norvegicus
  Genbank Accession No. AI103253
gaatttctatgaaagtatttaatagttggtaaaaagcactaaaaggcaggattaaaagattaattctattaatgaatattttcaaggcacatgggtagttctctctaccccctcctcacccctgaatattataggaaaccacacatataatgcataaaaattcaaccttccaatatctgtgagaataggaaggggttccacagcgtttctaattatttgggaattaaaatttaaaaattaaagacatccatactcagtccccacagctttgtaagcatgtcaccatcttacagacagcaagcgaagaccagccatgccctgcgcagaggagaacacatttacagggcacagaccactctgcagccgacgtcagacaccccatcctttcagatcactcccaagaacctttggtccttactaatacttgattacttccccttt

SEQ ID NO: 514 - DNA, 490 bp, Rattus norvegicus
  Genbank Accession No. AI103472
caggtttttaaaaagggcttctttaattaaatacatgggtgagaggccaggcggaatgtcggagaggtgccccctacagaaagaacaaacaaatcccttaggacccttgtcctgcctgccctgcagacatcacccttcaatggttagacccaagtcccagttatcaatcagaacctgaagttaggggggagggaaaggacaccaggacaaaactctggttgcttatggagttaactgccaaagaccagacctttcccggttacaggagggacagaccagcaggagctgggatgaagcaagatacatccaaaagacacaaaaagaatggggccccagcccccgacccaccccgcaaactaaggcatctcatttttgtggggccaatggaagttcctgggagggggagctggcccaggacccttcgagcccagctccagaagggtgacctccctccaccaggctcaggtaaaggtagcaatacccaaagcct

SEQ ID NO: 515 - DNA, 483 bp, Rattus norvegicus
  Genbank Accession No. AI103552
cgttttaaaatggctttattaaaggctagagtataaaataggaccaagttacaagctgtcagtaagaatttacgatttcgaaagtatgtatcaaaggagagggcagggtgaggaatggaaggccacccccacactggcatgtggggtgcacctggccgaggggcagattctgctgctcctgacaggaccggaaccaacccagagggcagaccagacgcacagagcctgggttcctgagggcttctgttggacacagccaccaagagcaagacacggagccctggagctgcctcccaggtgccgagcgtgggcgtgtggtagaacccagcatcatacactggcttcagccaaagagtgtgcttcagagcagagtaacgagtgtatgtcatcgtgatgtacaggggaagggaaagtgggaattacagttccggtttcctggccactgccgcatgttccctgggggaggccaagacgccagcgtaa

SEQ ID NO: 516 - DNA, 575 bp, Rattus norvegicus
  Genbank Accession No. AI103708
accaaaagataagtagaaatttatttcaaaatttaatacaaagaatacaaacctcatggttcctcaaagacatcaaattactcttctataattttctcctaacttttgagctggcaggtagagaccatagaagaaaatgttacacagaccgaatcccaagcgttgcgtatttaagcatcactaactgtactgtattttcccaaaccatctggggagtttcgatgggattgttccagcgtgcactgaacagtagtgaattatcatttccatcctaaacccagtaagccgtctccggctgtatttcacccagctgaaagcacataagccataggacatgaaaggaactgtcactagggccagagggcctgataccttggtcagccaccaaacactcttgttgctacagcaaccagtttgcaaacagaaacgatacaggataaaccaaggctctgtgataacatcagggctaagtatccctttcaaagggtgtaatagtagcaaggtaacttagaaattctatccattggtatggatgaattttacctgagatgaggacagtgatggacattaaatgc

SEQ ID NO: 517 - DNA, 398 bp, Rattus norvegicus
  Genbank Accession No. AI103758
gagaaagatttaattattgtgcattatatggattgggggaggggctaccaccttgatgtgagttctggggataaaactgaggtcacggggcttatgtgctaagaccttacccactgagctgtcttgctagccaagaagaacatagctttttaaatgccaatgaatcacattttccacaagtattaagactttaatgtctccgaataacaactttttaaaatgcacttcttatttatttttggtttttcaagacagggttaatttgtgtagccctggttgtactggaactcactctgtataccaggctggcctcgaactcagatatgtacctgcctctgcctcccaagtgctgggattagaggcatgcaccacaccactgcctgtaatttaagaatttg

SEQ ID NO: 518 - DNA, 475 bp, Rattus norvegicus
  Genbank Accession No. AI103782
aatgctctgaaaacactttattacacaaattacattcagattctgaaaaatagtgttctaacagtgtaaccatctaaaaataagacatcccggaaacacaccaactgaggagaaatttaaaaaaagaatttaaatagagactttttaaaatttctctcattgcaatataatgttagtgattttaaaaaaatagaaggagatttagcagcttttcgtcgtgtggcaggttggttctcttcactgccacaggctgagaatgctgaacaggaaaggcaccaaagaaagacactggcgatgggtgtggactgggagaatactgtgttcaagcagagaatagggctatttacatccaccaactaaaacgtctccaaatgtgaatgagctaaacttccctcgggggttggagcgctaccttggaagaggagggcggcttctctacgctaagttcatataaagacaatggcactggagtgaa

SEQ ID NO: 519 - DNA, 457 bp, Rattus norvegicus
  Genbank Accession No. AI103828
gagcttcaatctcaaacctttattttgctgtaaaggggagaaaaatgattagtggggggtttgtacacaacactttcatacaaagaaatgggtgccgcaggcctgatgtccagctttcttcacatttccccattccaatgtgaccagcaagcatgttgctgttccaatgacagtgaccatgccctggtcacaccatttttaagcactcataaaacgaatacacaaacagggttttcagagccaatttttagagaacattatctagtaagcggttcacgcccagccccctgcccttgcccagttttcacttttatttccttaatgttttgactgacagtttcccctctgctcggggtttaaagcaccattcaagcccagcccacaatgtattcagcagtgcagccttagccaagtacatgagtgaggttttctaccaaacatcacaatgacctcatag

SEQ ID NO: 520 - DNA, 576 bp, Rattus norvegicus
  Genbank Accession No. AI103911
ttgtgaaaagtttaatatcaaagcagaaaaatattacttatcaaaaatgatttccccatccattttgaagtagaaaatgatgtccccaccttttctcaagtccaagatatgaaaagaaatttagataatgacaactccaattatagatttcacaactatcttgtacaacaatctgtaatgttttattagaattcactatcaaagacattgcacctttccagtctgtgactgaatttaatgatgttcaacagtggttttattatgctaatgcttgataatatttaacagtgaattcaattacttcacattaatgtttgccaatagttattaacaattcttaaatattttaaatcaaccaacctagaagtacacaaggcttactctcaactcttctgaggggacatgaagaccgaaagaaacctaggccctgagtccaagtgtctaacccacaacaactacatcatcactggtgaactcataggtaggtacttccaggttgagaggtgcagggcccttcctgatcctgccagaagcatcatagtgtgacccatggcaagggcaatagtagccaccaaa

SEQ ID NO: 521 - DNA, 639 bp, Rattus norvegicus
  Genbank Accession No. AI103937
cagtatacaagagtttatttaatgatatgaatttagctccatcacgtagggccacgttacaagttccgtctgggcccattacaactctaacaacaaaaaaaccttaaaaaaaaaaagaaaatccacaactttctccatgtcattaaatatattcatatataataaccataatatattagtacgcattggaaagggacactggcccaaacagtatgtcatggtcacaactaaacatttacaattctgtgtgagcagaatcggcgacacaggagggaggccgggggtgtacccaggtcagggaaaggggaaagatgtccactgacacaagaggtgaggctggcttagtttttggctggggcagggccccacaaagagaattttgatacccctggggtatggcatggctctggtccacaggaatgtctgtctgtgaaccacagcccattcgtgagcctaacttgcccactctctaggtttcctggatagagcccttcagtgttgagaccctaaaggaaccatctcccaggtcagtcccaaagggtctccatttcagtcctgttccagctcggggcaattctaagagagcctgaatgtaaccactgaggcaaagttctagaaagtccccaaggccctcggaga

SEQ ID NO: 522 - DNA, 568 bp, Rattus norvegicus
  Genbank Accession No. AI103947
aagtacagtaacgacaaacattttaattggtatccaaaagacatttctatgtaaacaaggtttccttgagcaaaggtagggagagttgctacacaagaatgtcatttgttcttaaattgggattgttgttcacctcacaggagccttctggttcaggcagcctgttaaagcacttacaatctgctgcaggtggtaacaaatggcagaggcagaggcaggaggttctctccaagtttcaggtcaatcagggtcaccgactgccacaggaactgtaacaatcctctgtgtgcagctctggtctgattagatttgaaggaactgggctacaatgtggggaaagcaggttcaacaaggccctaaggcccacggatcttacagaatgcttacgtttatttttctctgataaattcatttcaatgaattttccatggacactgcttgaaggcaagagctacatctgtcgctgtttatgcttggggttggtcttacagaggacaaaccagcgcccacgcctcttcaccatgttgcagtctctacagcgcctcttgatgacacccttggtcttgaa

SEQ ID NO: 523 - DNA, 648 bp, Rattus norvegicus
  Genbank Accession No. AI103955
gagggctgaaccagacagctttattaggaggcttcttaaaggcagggcaggacaggctcggggtgagggcagaaccctgctgtggccaggctggaacaagttgcaggcttctgagacctctcagagctgagaacgaggtcctccaggcccaggtgggtcagtcctgttcagggtgggcagtgggagcctcaggctactgggaaataatggggcaggcgctcctggtaaatgccctcgtccttctccaggaacacacagatgatgagccgatccaccttgtccttgtgctgctccagccattcgcgcagcgtagctagcactacctccgcagcctcctcattggggtagccaaacacgcctgtggagatgcatggatagccaccgatcgcagccggtgctccagcagcaggtccaggctgctcaagtagcagctgcggagttcagccgcctggctggcagtgggttggcccacagcgatgggccccaccgtgtggatgacatgcttagctggcatccgatagccgcaagtgatcttggctttgccggtctcgcagttctgcagggtgcggcattcgtccgtcaggaaggatcccgcggcccgatgaatgcagccgtccaaccctccgcctccaagcagggagttgtttg

SEQ ID NO: 524 - DNA, 315 bp, Rattus norvegicus
  Genbank Accession No. AI104035
tttccagtgggtttttattagtagttgcatcatgattcagggtcccagggtagggaccatcatatactgagggcccccttttctaacggggagaagggcaaagagcagaggaaaggtgggcggagccaggtcagatcttcccaggaaatgtgccttcggctatgcgggcatcccaggctgagacccatgagacggggcaaagggacttgtacactcgccgggaccactcccaccctcgtgccgaattcttggcctcgagggccaaattccctatagggagtcgtattaaattcggaatcatgtcaaagctgtttc

SEQ ID NO: 525 - DNA, 588 bp, Rattus norvegicus
  Genbank Accession No. AI104251
caagacaaaaaggcttttctttattgtgcctgtgaaatggaatacaaaagtcctggttaggtttgatcccctgtcccccaatcacagccagggactgtcaccctggaagaggagagtgaggaggtctagactcttcgaggtgggtcctgggaagtgagtccattcaaggcaaatggtcaagaaaggcaaggagggcaaggtggaaggcttctggcttgtggaggtagcaggcatgacctgcattgtgcagcttcaccacggagtggttgggcaggtggcggagctgctgaagtgactctcgcgccaaggtgtggtccagttccccatacaggataagagttggggtcttcacagcctggaattgttcctgtgcgtaattccgggtggaggtgggtgcgatgggcacgaatccacatagctggtggtggctttgcatcaagaagggtatggcatagctgccactcagtgaggggctcaccaacacagtattctgcagctgtaggtcccggagcacgccctccagcaactccactcggcctgactctgtgctcacctcctttgaaggggctgagttcccaaaacctggaa

SEQ ID NO: 526 - DNA, 596 bp, Rattus norvegicus
  Genbank Accession No. AI104528
aggacaggaataagttttattaattacttttctaggaaatagattcagtaaatacagcacttttggaacatacatgtgctgttacacaagttttttaaatttttaagagctcttcaatgatgtttatcaggaaaatctctcattggtggaattacttctccagtctccagaattgtatcacctggaaatattctgggcttcgtgccaacaatggcatatggtttagtagccacatgatatttgacgtaatagtggacgaaccagagaggtatgatcacatgggaaacagtgaagagactggtgcggtacgccttgaagatcatgtacttccacagggcccggtcccgcaaaaagttattccagaatcgctccaggggccacatcctgcgcgggggcaacacgggctcccgggggctcagctcttggtccttcagccatcgccttctcagctcccgcagctgctgcagccgcagcttctcatcgggcgtgtaccccgacatgtcgccggcgagcttaccagagagtgacagcgcgcacccgaacctggggccggtcacttacgcgcgatcccgctccgcaaagcgaccccttgtgcc

SEQ ID NO: 527 - DNA, 480 bp, Rattus norvegicus
  Genbank Accession No. AI104773
atgatgacattaatctctatttatttagtcattgaaacatggtgtacattgatgagttttatataaacatttagtacatctaaaatccacaattggtaaacaatctgtgcttgcatttgtgtacaacattggcatttatatctggacgttttgttgttgtggagacccagtctctgagtctaatcacattgctccgtgttaccttaacaactgtgacagaagtgatatgttccttacaaggatcgttgcttcctagaaaaggtgtcacacatggggctaataaaccggatatcaaggaaacaagagaaacacagttgactttagataaaatacatgcaggagatttctggagatccatgtcaatgcgcagcggtggcacaagcagtgtggtacccagaatgaacactcagttctaaccatcagatactcgggtcaagtctccctgccccttctgaaaggggtggtgctagccagagctgg

SEQ ID NO: 528 - DNA, 461 bp, Rattus norvegicus
  Genbank Accession No. AI104864
ggggttttatatttattgcaactacaacttttcaaagaacgttagttatttaaattttgttcagacatgcttaaatatatacaaaacgacagtctctaatcccttgaggagaaggcggaacttcagtgttcctcatcggttcaggcacctcgccttgttgcaagcatttccaggcggcctttgagtgtcagttctgcagcactgcttctgcagcgcagcccctgccggctggctcgcggggacaggctatagcccgcggctgtcagcagcacagtcctcgctcgacttttgaacctgggtaaggagatgtccgggccttgttgtgggaattgtctttgacaccattagaaccagacatgatgttggctttaaggtgaaacccacaggatggaaatgggtttctgggtgcggggatggcgcggcagcctgaggaccggacagttacggacgcgagggccacc

SEQ ID NO: 529 - DNA, 419 bp, Rattus norvegicus
  Genbank Accession No. AI104883
gccataaaatatggatattttattccagcactaaaaaaaagtgaagggaaaaacatattgttctaaaccccattctaagttaactggcaataattgggaaaactgaagcagatacataaatacatacatatatacatacatatatttttatatgcatgtttttagaattcagtcttactgacatttatatcttcacttcattttgctttctaataaattctattacaagtcatagaatatactcctagtatttctactacttcagttccctcatcaatcagttaatattatttgtgttgaattcattaatttatgtttttaccatttgtctcattgaccaaactgtttatttgaaaatgtcatggaaaaatttcaagtcacattctgtcagttacccgttcattatgtgattttttttt

SEQ ID NO: 530 - DNA, 565 bp, Rattus norvegicus
  Genbank Accession No. AI105110
aaggacgcacagactttcctcctttattgttaagctgcaacatacatggtttaataaaacaacaacaaaaacatttaacaatcaagtgaaaataaactagaaatgaacgctcagaacaaaatcttttccactggaaacatgtcaggacggactcgggcttcgtccccacctcacggcgatttccttgtgacttaggagcctacataccccatgttttctgtagccatgcaggcgtgagtggaagtctgaatgattaaataaacgcaaagtctgtcgtttactgtaaagaatcatctcccgaggcagccaaactgagttagacaacaaaaccatttaagaaactcgccacatgttcgggttcatcttagaatccgtgaaccttcagctgctcctccttgacgatgccaacctccaaaagaaactggcaaatgttcttcctttggtcgccttgaagctgaatgacctctccgtactcagggtgttcaatcacagtcccattacaggcgaatttctttttgaaagctttcacaagtttctttttgtcataatcggccgcaatgccctg

SEQ ID NO: 531 - DNA, 496 bp, Rattus norvegicus
  Genbank Accession No. AI105188
tgtctccgaataacaactttttaaaatgcacttcttatttatttttggtttttcaagacagggttaatttgtgtagccctggttgtactggaactcactctgtaaaccaggctggcctcgaactcagatatgtacctgcctctgcctcccaagtgctgggattagaggcatgcaccacaccactgcctctaatttaaaaatttgtgttttagttgtcaatgaacaaagaacatatatctgattcaccaggaaaccaggaaggaaggcctttaaatcaaactagaaaactgccattgttggtgggacgaatgtgtatgaccagagctgtggcctgcccatgtctgaacagtgttgctgaggtttacgggtttctccggaacttcctggaaaaacaggttccctggctaccatcggaaaggcacttgtgcacattttcaattgggaaggtgactgcaagacagaggacaattctgacccattatcacactaatgaccc

SEQ ID NO: 532 - DNA, 492 bp, Rattus norvegicus
  Genbank Accession No. AI105272
tttgagataatttatacatataaaagggtttaaatacaatcacaccatcattgatttaataaagctcctctttccaagatcgagaccgaagaggcacttgctgtttgcagacaggtaaggcgctgtgcagtagaccatttctctggggacacagttcactgtgactggcatttgtcagacttcctcctcttcaaactccactaaaggtgcatgtctgttggcttgggctccttcactgaaaaacaccttttttatcctgccgtcctttggggcttttatggtgtgctccatcttcatggcgatcataaccatcagagcgtctccagcctttactctgtctccagccttcacgaacaccttttcaatggttccagtcatgggagcgatggtgcctccctgagttccttctgcactcactggagacaagtacttgggtactggaatgccaacttcaatactgccttccatagaaaacaggtagatccttgtgcc

SEQ ID NO: 533 - DNA, 556 bp, Rattus norvegicus
  Genbank Accession No. AI105371
ttttttttttttttttttttttttttaggaaatttttttttaccgacagttgcagaagcaaactcagatcacgtgacccattttgaagtcagaagacttaattggacttaagaactgtgcaggggggagggtccacagctctttaagcattagatgtccagcttcgaaattcacttaatgtgtaaactgcatttattaattcctttggttccacacatccgaccctgtcactcgatgtgctcactaaacgcattcccccaaccgcagcaacctgtgccttggagagagtcctggtatgtctcctgaatcccgacttcatgtctggagcaccaagaaaggtgccttacagattcccacgaccatgggcaagctctggtgtcatgctgacctgccgtcgcctctaactgtccagttcctcctccaggccacgttctccttcgtggctgcggcgtccttcagggtagccatcaccagttccttggtcctgactgcttcgtccctgcgccgcgagtccctttccggcatctcctgcagcattaactgcttctggagttct

SEQ ID NO: 534 - DNA, 428 bp, Rattus norvegicus
  Genbank Accession No. AI105383
ggaaaagtctctttatttgaatttggttctcaggacagggctccaagagcaactgtatgcaactggcccagccagtgggactctgaccccagtctcattctaactagagggtaaagtctttccaaaacatagccccaccttccagctttctctacaggggtccccaccacctccatatgagctttagaaataacctcccataccaggagatggatgagagggagggtcccatctcagtgtagacatagtagacaaaggcacagagtcatattggttcttctggaggtggcctccgctgggagtcccggccggacggggagtcactgctaccagagaccatccaaaggtagtttgggtgcacttggccctgcacagcttcacacaccatcagctccccgtccacagaaaacactcccctctggttcctg

SEQ ID NO: 535 - DNA, 453 bp, Rattus norvegicus
  Genbank Accession No. AI105398
gtgtggctcttgatgatttattgaaaagctccggtaagaaacacagcaagctgagtgatgcatattgaagaattcaaacggtacagcccatggatacagaagagcacttagtgctttgcccactcacagttttgtcaggtgcaaacacaatctgtatgattctccttagttggctgattcttttgattccttcagccgtgcatgttttctttgtgtgtgtgcgtgcagtcgggttttctgacagtgcgaccgatctgttcccttctgggcacctgcttccttcagctgattaaaatttcactcgtttcttacagaagcagcatgattgtttaagcgggcatgttcctgggacgtgttcgatcctttcatttctgcctcggctactattgcgcaggacatgttggtctgagtgctcgcacctgggcgccatgctttcctccgtaccctcgtgcc

SEQ ID NO: 536 - DNA, 619 bp, Rattus norvegicus
  Genbank Accession No. AI105429
tttttttgggctttaaatagatttttatttgtttatattatttttttctcccatacaggaatagcattacaacctaacattcagaatcctgttacacacatacacaggcatgccacatgaccaggtcgaggtggttgtgtccttgagtctgtcgacacatcacaacatggtcagtcaaagagttttcacttcagccagtctcaacacaaaacacccaacagagatgcactcaacttgttggttccatttggaactaggtggtagggaaagaaggtatttgaagcagggtgggggttgtctgcattcagtcccctgacacaaagctacgtggatcttgaaagccacccaggagctctggtagggtccttgttgcacctaagacattataggtcccagcaagttgctgaaagggttccaggctggggagcaggcatactccaaaacagcaccaaactgcactcacacacacagggccctgctgggctagactggcaaaggttagaaagtgacaccagctcaagagaaccactcagacttactggagaaagctgtaagttgccctttgatgtgattgggacttactctagaaacaggtccctctgacatccttagttttggc

SEQ ID NO: 537 - DNA, 448 bp, Rattus norvegicus
  Genbank Accession No. AI111401
  misc_feature (1)..(448): n = a or c or g or t
tttttttttttttttttctgtgaaaagacaaaaggaccaaactttatttctctacgcagccttggctggcctggaactcactatgtagaacaggttggccttgagctcacagagatcctcctgttgctgcctttagagtggctacctattggcaacaagcgccctcagcagagcactgatgagtcctcagagctcgtcggacgtgatgttcaccttgggtaggttacattctttactagtttgacagctctgaagaatgtcctggtagtggttcttcagatcctcatacaaggcaacagttttctgcgagtgagctaagggtaacaccttttcattcagcagcatttgtatctggaatttttcttgaggggtctgtgcgtcttcacaatggtaaagcacanatattaggtttgaagcatatggtacgatgtgaccacttcggaactcc

SEQ ID NO: 538 - DNA, 256 bp, Rattus norvegicus
  Genbank Accession No. AI111537
tttttttttttttttttgactttcattctttgtttatttgaaaaagatgtcagaaagcatatgacaacagactgactcagaagcgccaggcaaagggcaagggacaaaagggagcaggagaggtgagagagggggcttctgtccccggagctgcaaggtctggccaggggttaaacagccacaaggagcacagatctccagggtggagaatcaggaggagccaggtcctgggagagcactgtctctggaggaatgt

SEQ ID NO: 539 - DNA, 312 bp, Rattus norvegicus
  Genbank Accession No. AI111599
tttttttttttttttttgctacaataatgcacttttaatggtaaaattcttgacagcacaatgtctatttggcaaatcttctgttcaagcatccatccagtcacctctggaaaaggtgcacccactgcactgtccacttgtcagaggagcccttgaaattcagaaatgaaggaccttgtgtggagcttgccatgccttcagttaaagggacccacatgtggtacctgcaggaatatgctgtttagaaacatgtatttataacgtgttatttacccatgttcttaaatactgtttcagcttaacaatcaatct

SEQ ID NO: 540 - DNA, 471 bp, Rattus norvegicus
  Genbank Accession No. AI111853
tttttttttttttttatagaattttatctccttttagttaaaaaaaataatcgtaccaccgaatgaagcttttttcattttttgggggagtggggtcgggggagaggtgttgagaggggggaaccaaaaataaaatgcaaacagccaaaagtaaagggaatttatattcctctgtataaacatatccactaaggcaaacaagccagggccacggctgctgagctgggctgggcttggcccctccgattctcacaggttctaagaccgaaaaaataaaacctttgcaagtcctgcaggggtcccgggggctcttgaggcattgtagtaaaacaaagagtcatcgagtttcacgagcagtgacacgaggaacattgcataacggtggccccggtggccgttcacttagactggggtgacgtcacagttccacaacacagcaagggacacgcacgtacacacacgtaaagcgtg

SEQ ID NO: 541 - DNA, 442 bp, Rattus norvegicus
  Genbank Accession No. AI111970
cggccgcctgctgcgctcgcccggagctgctcacacttttatgccgctgctgctggcgatcgacttttccttttttgcagactgcgccagttctcaccaactttccgtctgaagttgcctttttttccccctgcttcttgtttcttttctttgcagactaggttcgtctgtccttgcctttttttttttctttctttctttctttttttttcttttgcagccaccacaactctaatagaagcgcacccccaaagccctagagggctgcagaagctcgggtcgggcagcccccgagatgcgcggagcagcggcgattcgcagtatccgcggctcagagaagctcagggacggagataggtgctagccagcagcagcgaaagcctcactgccgaaagctgaacgagagaggctgaacgcagaattctgcctgggcctcgtgccg

SEQ ID NO: 542 - DNA, 446 bp, Rattus norvegicus
  Genbank Accession No. AI112138
tttttttttttttttttaaggaaaaaaatcagtttattaaacatttagaagaacaaataaagttttggacttgacagcataaataccaccaatatcatggtgtacaattacactaacctcctgttaacttgaacctgtttaacagatgcaatcttcgtggtgttgtcgaaaggataatagctaattgttatgtctggtgaggtgctaaaaaaaattacagatttttatgtctccactgaaacatccacacacaaacacacattcccctgcacacatttggcaagaccaacaagttttgctcctttattattgacattgatttgaccaaatacctggagttgaatttggcttcactagagggatgtactcaggagcccccagtatgaaccaagtacagtcagagccagagaagaagttatctacctcagggagggccaaacacctca

SEQ ID NO: 543 - DNA, 488 bp, Rattus norvegicus
  Genbank Accession No. AI112199
  misc_feature (1)..(488): n = a or c or g or t
tttttttttttttttttagaagatgtttaagatgtttttatttagaagaggttatactattgagccagtcagctccttcatcccggcagcaatggctaagaggaatgtgccatcctctcatcctccatccagaccccagcgaggcaacccaaagcacatcattcaaaaagaatatccgtgccgtagactcagcactcaagaggctggaacagccaaaatagggaggccctgccctgaagaggagagggaggaaggcanaggggaatagacgtanactttccactgaaccggactacatgcagtacctagtgactttcctcccgttgcattttatttagactataaggttcacttgtgttttctggatatgcattgggtgctggggacattttgcttaccctcttcccctgaaccctacttctatcctanattgtgcgggccacctggccttgcaaatctttcacaggtgacccactcatataccatca

SEQ ID NO: 544 - DNA, 292 bp, Rattus norvegicus
  Genbank Accession No. AI112212
tttttttttttttttttgggttcttaattttcccagaatctagcgcctggaatatatttctcctttactaaaatggaataaaagtttagtaatctgaccaaatgggtatttgctaagtaatccagtatctatatacaagcccaaaccaaaccaaaccaaaccaaaccaaaccaaaccaaaaccaaaccaaaccaaagagccgtctgtgtctgtgtgtgagacgtgtgctaaaactcaatcctatgtagtcagtgtacagggaataaataggctctggctttgggatgaaaaa

SEQ ID NO: 545 - DNA, 476 bp, Rattus norvegicus
  Genbank Accession No. AI112571
tttttttttttttttttattcttttgactttaataactcatcttatatatatttatatatttatatttcttcttatcttcatttcctcagcaaaaggggaaataaaaatattgatctataaaataagcagatgataacacgatgccaaaaatagcttatgttaagtgcacggggtgaagcttgaatgcaagctaaattgcaacaatgtattgattcgacatttaaatacaggacttgcaataaaataatcattgagatatatgcttctacctcttaccgacattttagaaactaccctctacacgtagatccagttgtaacacttgacagtagcattatggagcatggtataactttggtacacactgcagatatggatagtgatttccgtaaatgacagtccttcaccagatgaagctctacacagaccagccacctgatcccacattgttccccaacactgtttgtccccgagt

SEQ ID NO: 546 - DNA, 312 bp, Rattus norvegicus
  Genbank Accession No. AI112636
tttttttttttttttttgcattatgaaaaaatagatttattgcccaggagttgcagaaacgtctcccgagcagaaaggcacgggtctcaggccctccctaggcgcttcttgatgaaatggcccaccagccgctgcggcctttgctggtattccacaagcacattatggggagtgttgatctgatccccttgcagacggtccagaagagtgacacacaccacagccgctttcaggccacaggcactgcacatggtggcaaacactgaagattccatctcgatatttcggacacccgcggcatgggctgcacgc

SEQ ID NO: 547 - DNA, 313 bp, Rattus norvegicus
  Genbank Accession No. AI136233
tttttttttttttttttaaagatggatcatacattgtagcccagactagcctggccttcacactcagtttcctaaatgccaggaatacaggcatgcaccaccatgcctggctaacgggtggctaacattatatttttaagtctttgaaaatgaattagtgcagctcccgtgccatgaggataacacccactttcgcataattattgcttaagcaagccattcagagtagatatgggctgtgtggctggacagaaacacactgagaaaggcaaccacgccaggatgctctttcacatcactgataaactcacat

SEQ ID NO: 548 - DNA, 404 bp, Rattus norvegicus
  Genbank Accession No. AI136338
cggccgcaaaggttttggactagatgagtttccaccgaaatgtcggagaagtcaggccagagcacaaaagcaaaggatgggaagaagtacgcaacactcagtttgtttaatacttacaaaggaaagtccttggaaacacagaagactacagctcgacatgggttacaaagtcttggaaaagttggtatttcacggcggatgcccccacctgctaacctgccaagtcttaaagcagaaaacaaaggcaatgatcctaatgtgaatattgtgcctaaagatggtacaggatgggcatcaaaacaagagcagcacgaagaagaaaaagcaccagaagtgtcaccagcacagcccaaacctggggttgcagctcccccagaagtagcacctgctcccaaatcatgggc

SEQ ID NO: 549 - DNA, 530 bp, Rattus norvegicus
  Genbank Accession No. AI136723
tttttttttttttttttcctaagtcacatgtttattggtcaaggggacactggacaggctacgtgtcacagtcctcagggacagcagccgtgatgatgagagacggctccaggaccccggagctagcaaagctctcctctgaacacagtctctggctagggagttgggaggcaaggccaccctgggtcagggactccacaatgacctctgcggagcccacctccaggtctgcaggtggctggagagccaccaccaccatcttctcatcgtcgatgatgaggttccggagcttgcgctgccgagggttgtagttctccactctatcgtggatctccatgtgcctccgcaggtgagcctgccgagtgaacttgtagccacactcggtgcactcgaactttctcacgcctttgtgtcgtctgacgtgcacccgtaactgttccactgctttgaaggtcttgccacagatctggcagaaatgaggtctgccctcctgatgacggctggccacatgcctcagaagcctcgtgccg

SEQ ID NO: 550 - DNA, 376 bp, Rattus norvegicus
  Genbank Accession No. AI136977
tttttttttttttttttaattcactcaaaattcttcagtttttacaaaactaacagggtggagtagggaagggagcagggaggcagccgcaggggtgggtaggcggagaggcaggctatgcttctgtcttcacctgagcctggttgcctgccacattgttcggctcacccttcatctcagcatcagtgggatggtccacctcaaatacaagtgtggcatttggttgccacagcaatatcccaagccttgatgacctccccttttcccaggtcaaaggagaatttgtccttgcggtccaaactggagtcaaactttgtgccatctagcagccagccagtgtagtggacaaagactcggtcccccctcgtgccgaatt

SEQ ID NO: 551 - DNA, 475 bp, Rattus norvegicus
  Genbank Accession No. AI137049
tttttttttttttttttgaagggaatttgctttatttaataaactgaagccttaaagcattggtaatttctatgtactacattcacgtatcccagttggtctgaagtagaaatgtgtttctctagctttctttataaggttcaattatcttctttttacattaggattatatctaaacagatcatcagcaagagagtcttctttcgcttgttgtttctgtacctccatttcatgtttcaaccactcttctaattcagtattctttcgagcatggtgacctattaaatctgatcctccaataatgtgtggaagctttcctgctccaggacacgtagccttcttgaatttcttgaaattcttcagttcaccacgaccatttagtgggcacagatttctggaagagttattatggacaaccagtgacctaaattcagtcagcagcagttttcttggaagcctcgtgccgaattcttgg

SEQ ID NO: 552 - DNA, 536 bp, Rattus norvegicus
  Genbank Accession No. AI137218
  misc_feature (1)..(536): n = a or c or g or t
tttttttttttttttttactagaggcagtaaagtttactcattaaaactcaatactgagtcggaggcatccatatggccccaatctctgaaccctgaatgcatagaaatggaagcagctagctgacttgcaggctcaggacttggtcggcctgctttccatagctagacgcctatgcatcctcctctaagagtccacccagtgtcccagtcaaaagcagttgttgctttctgtggccatgtggcactgctcctcatagacactggctcctctgtggaaggatctgccaacagcacatggaaacatgtccctgatgtccgcaccagggctactangaagccccagggctgagtctggctctttacatccttttcctcatcttgcccttcctggtgggagcaccccggccaaaggcgctctggcgcaactcctgngctcggcggcggttgcgtgctgaaagctgcttcaggccccctcgctgcangaagcgctgcttctgggcttgacggcgctgcttgagcctcgtgccgaattctt

SEQ ID NO: 553 - DNA, 563 bp, Rattus norvegicus
  Genbank Accession No. AI137224
  misc_feature (1)..(563): n = a or c or g or t
ttttttttttttttcttcgcnaaaaactttatataagtcacacgcattcaataagccatctacaacggagcagaagacctcaccgaactaattcgtaagtctctcccagaagtgggttgaagggtttcccagtgcgctcccactgagaagcaacggcagacacagcaaatgcagccacacactgcatcctttccacaggatcagagaatgagctggctttgtggatgaggtaagtgtgctccatgtactcagtcagccgctgcagaaagctcagaggctcattaaagatgactggcattgtgatcttggacagttccatcccaatgcatttcctgaggatgctccagatgctgaagtcatttctggagaacatgtgatggcaggcttgttctgtgctttttaatgccgttggagagcgcatctcctccgccacagtccttcncttcggacattctgtgcttcncgctgttcgcaggcacttcgttctcttcanaggcgcgtgctgtcacagcttccagacaagtcagcgacccctcggactncggacctgacagtgcatcata

SEQ ID NO: 554 - DNA, 492 bp, Rattus norvegicus
  Genbank Accession No. AI137227
tttttttttttttttttcagggtttgaattgactttattattctgtaaatgtgaactttacaaagcgttttacaattactgatgacatcctttgccatggatttccatgtctgaaacagctctgagcgccggctcacagctctcgggtttccctggtcagcttgcagacattgctgtgggttgtttttttttttcttttttttttcattttttaaattttttgttgtttttgttgttattgatacaatgttttcagccatggctacaaagtaacagtcttgtcacaccatgaaggacccctcagagtctctcagttacctttcacacatccacattcaagggcaaagtaagacaccgaatcagatgttagctgaagcaactggtatagaaaacaatacagaattcaagtactgcgacagccgggcagatatgcagcccctcccagctcacactatcagccctgtctctggtcccctcgtgccgaattcttgg

SEQ ID NO: 555 - DNA, 483 bp, Rattus norvegicus
  Genbank Accession No. AI137435
tttttttttttttttttgtgagcaaatccaaatttattttaatgccatgtcatttcaaaaaccccagccttggttccctggaacagcatgccagaggtacaaagtgtaaccttcctctataaacccccagcaagtcatccaagtcctcagcttcagaaagtcagttctcttcagtctactcctctggttcctggtttttctttcaaggaaggcaacttaaaaattaggtagctgagtgtggtggtacacacctctaattctagcactcaggaggcagaggcaggtggatctctgtgaggctggcctagtccacatagtttgaagccagccagagttagtgagaccctgtttcaaaccaattctaccccaccatttaaacagggaacaagaacccactgggattttcagtgtaggcctaaaatcaagtgggggaatgcactggaaacagagttgggaaacactttacaattttgcctcgtgccg

SEQ ID NO: 556 - DNA, 475 bp, Rattus norvegicus
  Genbank Accession No. AI137579
  misc_feature (1)..(475): n = a or c or g or t
tttttttttttttttttggggaaattattctttattgaaaaataccaataatactgacagattccaaaagcagttactgtcccagagtacaaagcgcttagctcatttaccccaaacctgtttgcatctcaaggttagcatttctgtaaatcaagatacaaatccgataacttcaataaaacattttccagctttattctttaaggagctgtataccttcaaagtcagggtcacgaggtcagcaggagcacggggcagaatgcacccggcactccctgggcgtcagtttgcagcaacactggaaaccacattgttggtgctggaaacaaaaatcccgcacaagatagctgccctccaggatgagagggatgttggaaacagcatgtcganagatagcttgtttttcttataattaacacactattattttaagattgctctttggaggaaatcttaagaatgcactgtaatttcc

SEQ ID NO: 557 - DNA, 415 bp, Rattus norvegicus
  Genbank Accession No. AI137586
  misc_feature (1)..(415): n = a or c or g or t
tttttttttttttttttaaaagggtaaacgtttatttggagttagtcttctggcaggtggtattaaggcccttcaggcagagttcaggagctcctgtatggctgcctgctgctccggactgagttgagctatgcattcagtccacaatcctccagaagtctgtacttggcgaactacattggccaggcgtttggcacaggggtcttcatgtttgatggcctcatgcatttctccttctgcaattatactgaatattttcggtagattggtattatttgggccaagaacaattggatgattactttcaatcaggtcacacaggtaactgaaggtctggacagcttcttctttatcttcatgtanggggagccacgacagccagtgtggtaagacctcctccacattcacgcagtca

SEQ ID NO: 558 - DNA, 513 bp, Rattus norvegicus
  Genbank Accession No. AI138020
  misc_feature (1)..(513): n = a or c or g or t
tttttttttttttttttcctcnacccancagggtaaagtaggtattttatttgtggtccccaacaaggcttcccccgcttgcttccactctttctatactttagaaatctgcatcctgggaggctctgagtgagtgtctgtccaggtcagtgcctgtgaatcttaggaactccagatggtaaccccaaagaagagagagaggggggataagtcagcatccggccaactccctcattgcctctccttcaaatcgaaaggagagccagccttccgattcggtcagatcttgagcccctagaaacttgtacaagttcacggccttcttgttccagttcagaactgccaggcggaactgggagcaccccttacgcagagcgacctcagccacctttttgattattttggtaccaatcccttgaccccgatatttcggcatcacatagatgtcttccagataaatgtttcgtccggtccatgtgctgtagatgaagtagtagagcccgtagcccacca

SEQ ID NO: 559 - DNA, 510 bp, Rattus norvegicus
  Genbank Accession No. AI144741
tttttttttttttttttaaaaggatttaaaaattatttatttttttattacaataaatatttatcaataaagaattaaaccattgaaaactaaaacctactgccttaaagttggggtccatagcagcagacacaaacataaaatccagttgaaaggtcaagggtcaaggtttctagactccggtgacaacagtcaggtcctgattatatggactaatgacggggaacggtaacacagagaatgcagaacccacactcaaacgacccagagtatgctactatacatccaaccacaagacttggaacattccggtgaagtgaagcaggctcagagctctgcttcagcaagatcaagtatctcccagatggcgtccgcaagcacaccgctcccaaagctcctcccagccgaaagagggcctgggagacccagaaacctcaaccccaaagataatagccagcattctcgaaaccagtctttctggctccaaagttcctggtgaaagggacgtgg

SEQ ID NO: 560 - DNA, 443 bp, Rattus norvegicus
  Genbank Accession No. AI145095
tttttttttttttttttatttgcagctgaatgtttattgcagcactcccaagtgatcactgttggatgaataaggaaacaattcataaccaataaaaatgttgaactgccttttttacagtaattgtacactcattgtgcttagtctgtaaagttgtatcctcagctcacccataaccttcccagaatagaacactctgtcatacattaacatagagccttcaaaaggtatacacaaggctcaactctgcaggccataccagatgctgtcccatccactagacagtttaagagggacacagcaagggccatgcagaccccatctcaaacatcccagtactaatactctgtatttgcttcttgtgtctgctttttctgaacatcaccacatccagttttccttcgcaagaagtctcctctcactggccatgcatttctgctcca

SEQ ID NO: 561 - DNA, 478 bp, Rattus norvegicus
  Genbank Accession No. AI145329
tttttttttttttttttaaaagaaaatcagactgttttattgtcattatcaacagcccatagtttggaagggatgctgatgctgacacaacaccctccaacaagcaaattagactctcaagtagttcaatgacatgatgctgaataagttaggatgctgctgctgctgcacagtgagcctccattgaaagcactctcaaaacaggaacagactagcaaacactgtcttcttctccagggcttgcacaggacacacactcttggatggacgttcaggaggtaagcagtcaggaggcctgcacctgtctcatctcataacaatgctctcaccaagagcggatcccactaagccaggctttggcctgtttgcgttgtaaagagcttgtcgttcttttccattcaaggaagtcggcagaattgtgatgatcttacagtaatgtggttcatgacaacagacgtgaacattacagcattgggga

SEQ ID NO: 562 - DNA, 565 bp, Rattus norvegicus
  Genbank Accession No. AI145761
  misc_feature (1)..(565): n = a or c or g or t
tttttttttttttttttgaatcttcaacgactgatatttcagtgaatagtgtatttgttctttcaacttttctgtatgtttggggttttctttaataaaagaaattgtggggaaatggctgtctattgagttgccagttattggagggtgtgtgtaggagccctgcccagtggaattcgacttgggagggtgagggaggggtgagcaatctgtctggggtgaggggggttcactantgatctctccttggagagtacaatgctgatgtttgggttactccatcctgaagtagtttggaagaaggccaaaggatcatgagacagacattaccgagaagggatctaagacctgaagttgcactgagaaagtggcacggtgggggtgacaacctgctgcttcccctgccctgcttccttcattttttccaaccctaagacctaagagtagagaagatggtactacagttgactgggacncacaangggtaaagtgtctagagaccggccaccctgaagtgtctgctatgtttctggtgttgcgcgccctctcgtgggcttctggggaa

SEQ ID NO: 563 - DNA, 553 bp, Rattus norvegicus
  Genbank Accession No. AI145859
tttttttttttttttttggagatattgctttttattgaacatgtagaagatccacttttatataattataaacattttacaaacagttttgttaaaaaacatttcctggattttatcactgtatggttaagacataagacatatataagtatgaaggtcattctccaagtattagaacagaataccaatggagtcacttcgttttttttttttccagcgctcaggaccaaccccagggtcttgcacatgccagaaggttccttaccgctgtgctgcccttcagttaccagtaacatttttttcataaacactgtattaacctctaaaggggtaaactaacccggaggaaggtaatcctcaagacatattgtcaaagttcaccgaagtcgtctacagtctgtctttccttgcactgaatctggctgatgaatagcagtgtaagaatgtatataagataatcacactcacttcaagatacagaacacattgtaaatcaaaatttttatcatctttgctctatggggagaccactcatattaccatttttacattt

SEQ ID NO: 564 - DNA, 480 bp, Rattus norvegicus
  Genbank Accession No. AI145870
tttttttttttttttttaagtgacacaagaaatggtctttatttggaaaacgattacaaaattatcatccaaactcagaaggcacagccaacacatacacacaaagtaaacaaggcaggactgcagcaatagctcacttaacaaaattttatctgactttgggtggaggaactttcccaagtaaaaatcaactggagtgctctgtacaaagctttcctaatgtctaatctcattaatgaattacttgcctttgcagcttttaagtcttgagctaagccttcagaatgatttattgaaaagtcttattcagttcagttttagagaagaaaactacaacttctcaaagtttagtttaacacggtctcctcttggcaagcattagatatctttagcttgactgttcctatttccccctctgtcccagctcttttagatcacgttagttatttttaaggatccatcttttttgacatgtctagc

SEQ ID NO: 565 - DNA, 475 bp, Rattus norvegicus
  Genbank Accession No. AI146005
  misc_feature (1)..(475): n = a or c or g or t
tttttttttttttttttcactaagcaaaacatattttaataggaaaaaaatcacttcttttttaaaaaagtgtcctttcatgccaaggtgtatacacacaatgcatgggctaaaataggcagctgattcccggggtgagaatttaatatcctgaggttatgaagccaggccacatccacaagctggccccagattcttggctccccaggcccgggtgacaggcaggtgcggagattccagcctcagcactcacagcagggcagcatctacggttcagtcagtgtctccatccccttcactgccctccagggagctggggaccttggcacctgtgtcatccgctccaagtgcagtgccactgaagttgtggatcggcaaagtgttaagccactgggccatggaccgctcatcccgctcagtgctgacaatggtanggtagatgtattgctccttgaaagcagtcaccttcccttcc

SEQ ID NO: 566 - DNA, 435 bp, Rattus norvegicus
  Genbank Accession No. AI169037
gccttctccacacacccttccgccaggacctgccacagcaggaccctcctcgcccagccttgaggccttatctgagtcattctccccctcccccacctccagaactggggtccaatagatcgtcccactcgggcagcagagggaagcagtcactagcttccaaccacatttcccaactctgtccttggtccaaaaggaaggtggacagggcaaaatcacctgctcccgtgagaaaacagctgcttaaaaggagggatcccaggcaactggtgaagtgagtgagggcagggctttactattcctaccgcccaggctcaggaggtggcaaatacatcgggatggagggtgattaagttgcaccagcagatcgggtcatgtgggagttgagtagatggatggaggtggaattattctagaagctagctctactgctgc

SEQ ID NO: 567 - DNA, 506 bp, Rattus norvegicus
  Genbank Accession No. AI169058
gacagtccggtcttttatttagaaacctgattgctgaagaacaagggtggcgccatctccaacccttttcgctgggattgtttgtgaggtgatagtaagggctccagttccctcagtgacaagagacagtcagcagacaggaagtaggggccccaagggagaggcaacagctccctaaaccaaagggatcaaggtagggtggggcaaggtggggttgggaatctgctttcttgggagtctgaaaaactgcagccctgctgttcctgccactcccacgcacaaggtctcatcaagtctctgggtagagtggggttaagtgctaagaaggtgggggacaggaaaagctaaaggagcaaaggagggtatgtttggggagcgaaacctatagcctggtcgtggccttaggtggctccctgggactgcaacaggtctccctcgtgggtcttcacacaccctcaggctgggcccctgaaatccagtgctgggttccaatctgccctttgcct

SEQ ID NO: 568 - DNA, 609 bp, Rattus norvegicus
  Genbank Accession No. AI169115
cacgcaatggccaactttattcagagcatcagatggtttttgcaatcacaagggcaagcttcaagtgacaggctacgtgtgacagagacatgtgtctcagtagaggcatagaaaccaagaacaatcaccagttgtaacaagtaatctgaagtaaactcactcctaaccactacacctgagagggacagaaaaacagattccaagaacaattctgttaagaaactgaggtcacaaaactcttggcttcttggagttttctccgagcattcagaaatcccctcacacaactccattcttggaccatgttccgacaatggcagaacgatacccttgaaccgtaagccagaagagatctcttcttaagtagctttgtcaggtgttttttctcagcaacaaggcaagtaactcatgcgacccacctcccaggacatctgactggggtggggcctggaccatggcgcctttccctaacagttactggatgcatagaggtccacatcaaaccagagagttaggtggtcagtcagatcaggatttcagagagctgttgaatctttctaccagctttttatctcaagagattcttccttctaacttacgtttcttagg

SEQ ID NO: 569 - DNA, 556 bp, Rattus norvegicus
  Genbank Accession No. AI169163
atggggttgtcataaagatttaataaaagaacaggtacagtttgttgacttttggcaagtgtttctgatccaagtagaacacaccttcatggatggtgtgtggtagaagcttcaagcagtctcttgggttagactgctcaggactgaaccccacccttgttgctcatagcttggcctttgccatgctactaagccatttttggactgtttagtgatgttaattatttttattactcaggaacaatcagttttctccttggtcattgtcctggttgatttattgtgtcaaggtgacacaggctagaggtgtctggaaagaaggactccagatgagaaaagcttccatcagattgcctatagacaagtcttatatagtattttcttggttaatgatggatgttggaagacctggatcacttggggtggtgccaaccttgggcaggtaggtggtgctgagttgtataagaaagcagcatgagcaacccatggagaacaagcctgtaagcagcacttcccatggcctctgcttcagtttctgcctggagttcctgcactg

SEQ ID NO: 570 - DNA, 637 bp, Rattus norvegicus
  Genbank Accession No. AI169177
aataatgacaggcaatcaagtttattcgtgttcacagaacatactaggcgaccccagacagccgccctctgacaatccatggacccaagacttccagtcaggaagacatcaaaggccacagaccgtattcccaagggtctgccaaagtcttacaacagagtcgaagtgctggaaaatggagtgttacccctaaacctatgccccccgaccaagactaaactaatcctcccacaactctgtctcacggaccctataaatcgtaataaatatctgtgtcacagcaagggggcatatctcgcacccctgcataagttagaataaatattacatacacccctccttcacctaggaggatatacataaatacataaatattaattagacaccgagaagacctccgtccgtcaccagtgagcctagccaggacccacggtgcctcgggctcgccccaagaaccggcatcttggcggtagtgttctgagttagcgttgccttataagtcccagtttgggatacgttcttgcgcaccaggtacccctggtgcctctttgggttttttttccggactgtgacccatcgcgtttagaatgccgccgggtgttgctggagaaaagctttgagatccagagcatagtcc

SEQ ID NO: 571 - DNA, 646 bp, Rattus norvegicus
  Genbank Accession No. AI169232
cagaatggcatgcaagtctttattgttcctagtctccgtgtgcatttggcactccagcatcgacttcacagacagtgtgaataaaggattcccatgactgtgagctataactactcacctggaaagaaaccaaactgcctctgaagtacccattacatgatactgcatactactaatgcatatgtcagtaatatcatgctgttcttaatgtctaaaaatacctgttaaagatcatgcaacatatacacttcatgaaaatgctcaattacactcaaacagcaaggcagtgtttcacggagcagctacaagtaaaccacacaggtccagtcagagatggacatctcaacgagcactaaacctgccacctcgccatctacaatcctgcccatggctcaggacatactgctaggactggtctacataaacacactataatcaaaggacaaacggtctcaatgcatgatgatgacaggcacgctctagcctacatgatacttaaatgtatgtggtcattctcctagctttgctaacaataatgggaagtgtcatggtcacaccagctccgactctgttcttgcttccctggatgctttcaaattccttcttaaaaccatgcctccattttgtaacccccgcagaactcaaa

SEQ ID NO: 572 - DNA, 571 bp, Rattus norvegicus
  Genbank Accession No. AI169374
accttttagatttttattagtagttctctgaagaatcaaaatagttagcaaattactttagattcaagactgtagtatatcctttgttgtttaaatctttaatgttgaagaacataatacaaacaaaccagagagactggtttctatgcctaggtgttattcatttgtcatcctaaagcagggctggagaaggctgttcaacaactgggggttagtgctgagtgacaagtcgtggcctgtttcctcaccaatgtgctgggaaggagccgatgattactcaaactgcttacagcttcctagcacaggggctccaatgccctgggcagcagaggattatggtctaagccaaaagaaacagtctgaagaggggcacatgggaactgcctggcagaagaggcagactttgccccatgaggaaaagtgcatctttgtaccgcagagacattccagaaccagtgtaacactaagggctgtgtgtgggggaaggcgggccccggaagaacctctcagttgcattccacttgggttagagcccagtctgccagtgaagcagcagagaggacagcgtcta

SEQ ID NO: 573 - DNA, 450 bp, Rattus norvegicus
  Genbank Accession No. AI169517
taaccctcactaaagggaatatagcttgcggccgccaaactttttttttttttttttttttttttatataaaaatactattttatttctcatcaataaaccccagctacccgctgggatgtcgcatgtcattacccaacttgctgaagaggatgaaacagtatgatctcaagtgcaacgccactctcaggtatacaaaaagctgctagcttctaaaatgaaataggagcccctagaataaatatgctgtaggggacagggggtgacattaagcagccagatcatccaagaatagcagttgtctgtcggagagcatgtatcctatcgtgaagctgagtttcctcctgatgcttttatagggcctgaagccctgactgctgcagaaaggcatgggcagcctctggctgatacaagaacagcagttgcagcagctccaaactgtggcctacca

SEQ ID NO: 574 - DNA, 627 bp, Rattus norvegicus
  Genbank Accession No. AI169622
aatatttattcattttcgacaatttcatatatttttattatatttttctctatcccccaactcctcccagacccacgcccccccactgctacccttccaacttcatgtgtttttctctgtcttgaaaataagaactaaaaccaagaacaaaagatgaaaactgctataaaatatggagttctatttgtgttagctaactgcttgtgagaatggggcctgtcctgggatcgtgattagtatactcagaatcactccactgagcaaaactgatttattctctctcagaagagagtggaaagatcttttgccttataaaaatgaagccactcaacattccagcatgaatgtgggagggtcacagaagtacccaaccctaaacaaggagttattgacagctgatggtttctggggaggaagtcaattttctttaggggtatggcctttcatatattggcagtaacagtggatggtgtcacactcatgagtatatgagcagcagtaattggactctttgagctattaaaaaatacatgaagttaggaaggtgaaactttagaaacggggactcagaattttttaaaaggtcctcccagttctgagggaattcttttccttctttgaatcact

SEQ ID NO: 575 - DNA, 649 bp, Rattus norvegicus
  Genbank Accession No. AI169655
cggaccataaaatatttattaaggtatactcttaaggaatatagtgaatataaaatgtaggatcacaatgtgaagcaatttgaatctgctcaaaagccagcacagccctcctaagctgcagatggagaccactaggaggaattactgcgggccagaggaggaggacagagcggcttttcaggaacggttactactggagcttcggacacctctgtcattgcaagaccacaccacattacactaacgcagcaacaatgcattcatattgttctcattagtcattagtagtcaatttgcataaaacaccagaaaacaatcaccatggagatcacaagtgagttagaaatggacctgttcttgcaaagcacgcactgtgatgggatagacatggaaaggagtgtgcacattacaggagctgcacgcgtcccaacaagcccctctgccttctttcctggaaaagcgaagtacaaggaacaggcacaactaatacttgggaggcagtgtgtagctaaaatctcatttaactaataagtcaatgatttttaaaatccccgtaaatcttttctgtcctgaggtagttgcaaaataaatcataaactgggtaatcaactacagtggaggctgcaactcttcattcatgaaaattagt

SEQ ID NO: 576 - DNA, 490 bp, Rattus norvegicus
  Genbank Accession No. AI169706
actacagggttgggacctaggaatacaaagttaagaatcagattctagttcactagcaccaagctctggaaaaggaaggcagacaattttaatactgtatggttgtttcccagatacacgtaggtggagtgcaaggaagtagggaactaacatcagctgcttaattccaagtgtcagacattagcaatgtttatttcccaattttgaaggcaggtttcaatgtccctgacttttacccagtaatctttgaagggtttgcacaaataaatatactgtttggtttagaagatgacttacccatggtcaaggatgctgaggggctttggaaggctctcccctacccaagtacttcctgcagtttagaggaaaaaggacatgggctcaaagataatgcagtagtgtgtgtgtgtgtgtgtgtgtgtgcccacgcgcgcgcgcgcgcgttcacgcacgtttgtgtattttcgaaacatggtctcacttaggcctg

SEQ ID NO: 577 - DNA, 557 bp, Rattus norvegicus
  Genbank Accession No. AI169947
ccatttattgtatagttagagtttcaatatcttttcatttgggaaaccaaaagataagagaataaatgtacattcctactaaacttgcctttgaaactttaccaatttaaatgatactatattacaagattcgtaaggattgacacaagaaaggactgaaggatgtaagacatggcccatggctggcaaaaccggaaaggcaatggatatatttcagcacttcctatgtcctcaatcaccttttagaaaatccatcataagccagaatgtacatggtagatgctcctcagaaccacctcaagtgacgccacataactaccgcttaggttgcttcgaactaggttcaacctctgtggaaccccaagtgcctggtttgagaaggtggctaaacttaatgtaatttatagcaaaaatatacatcataattgtacctgcaacttttagagacaaaagtgattaacctggcactgacatccctctatcaaatgccggttaattgaaaaattagaaaatatcacagcaatataacaggttggggatcttaataggaaaagaac

SEQ ID NO: 578 - DNA, 554 bp, Rattus norvegicus
  Genbank Accession No. AI170249
cacaggatgaaacacatgactttatttacaaaacagaggctcacccctccagaccacatgtactagcctacttgtctagctcccatggaccaatgagggcttagtaggggcaagtaaccacagtaatatgctccagccagccagcctcacttccagcagatgatgatgtttgggtcattttctagtcgctcgtccagctcatggtagctcatgcctgtcttgcagcagatctcatcatagctgtgacagcctgtgtagagccgggcagggtggcttcgttcctcccgagacactcggactggatatttctgtagtctccggatgaggttcttcataagcccaaactggatcagcttcctttcatcaacatgttgtaactgctgggggtggcggccgatgaggtctcgaacagtggtaccagggctcaggctgcagtacagctggaatacatctcggagactggctcttttgtgtccttgtttggtgacgtaggatagacatgcctcctgcagggacttgtcatccaccaggtcctggacttttggcgttgggca

SEQ ID NO: 579 - DNA, 688 bp, Rattus norvegicus
  Genbank Accession No. AI170379
ggttgcatcgagtgcctcacagacactataaaaccaaaacggaatagaaacatctcggtggttaacagaacacaggaaagccaggtacagagtataatttgtcaaacacaatattgctgctccccgccccacccccacttcctccaatttataaaaagaagaaagaagaaaagaaaaagccatttggataaagagcaacacaaaatcaaaattggcagctcactgaatgcttaaaattcaggaaatcgtttttgtaactgaaactggatacattcaccatttctaacacttaggctatttttttttcaatacatagtttaagtccattcttcaggtgaaaaaaaaacatgtctttaaacacaacaatcaacactgttttggtgttccttgtttgtgtgtgtgtgtgtgtgtgtgtgtgtgtgtgtgtgtgtgtggacactgatctatatactgcttctatgccattgcctagggtgggcagcatgcatgggtaagaggaagggacatgcactatgtcatccaagtgccgcccagcctctgccacagatgacagaccctgcatccctcatttctagatgagaaagccaaggctgtcaagtcataggctctggagggaagtgcgagtataaacactgcagtgtggaaatccttcaagaaggtttttaacatctacagaagctaaacattt

SEQ ID NO: 580 - DNA, 488 bp, Rattus norvegicus
  Genbank Accession No. AI170632
ggtcttgttttgatccaaacattggtgttttaaaggttgtacacaatatttgttaaaaagaacatataaaaatacctttttagaagcttctataagaaagaaaatacaacgtttaaccccacaactttcctctttgctagaactgcaaactaccgctacagttttaaatagactttgttgtttaaactatacatccaggaaaatctaaaaaaattaaagaaacgtgcatataaatgattgcatagcagaacaagaacattatgtgcaaacagtaaagaaacaaaagttagaaatactattaaatatacaaaggttctagaattaaccctccaaacacattccacaaacagttcttaaaaccatcttttgtagtctacaagcaaggactagatttctaaaaacagaattgaaaggaaaagtaaggtgatcctctaagaggatcgtcccccacaatatcttcactcacatctgtaagcagtgagtctaag

SEQ ID NO: 581 - DNA, 591 bp, Rattus norvegicus
  Genbank Accession No. AI170663
aggtggtaccaatctgtgtttattgaaaacctatgtccagcacatggtgcatgtttcaacatcgacaagacataggtgtatcccctgttcagtgaaaaacaacaccacccccccacaaggagaaaaggcacagtatatacacaagacacgagggctaggctgccccacggcaggggccataaattatagtgccggctggggacaggtggaaggaaggtagagtaggtggggtccaagcacaggaagggcctgcccctacctactctctgcttcaaccagcttgaagggatgagaagcacaaggagggacaattcctttcaagtctctcaggaagccctgagccaagcagtccacaaaagcaggaccactcttctttctaggactcccccgatctcaaggcaagagacctgagtcctgctgcctaccctgaaaatgagaggcttgtggctgggaaaggtgtgggaccagtgtctgccgccctggcttattcagacaggaattaggggtaaaaatacactctatgggaggtaggagttagggtgggggaggaagaacaaataatcatgctgaagacccctggaccctcgtgcc

SEQ ID NO: 582 - DNA, 694 bp, Rattus norvegicus
  Genbank Accession No. AI170759
ggtggccaaggcatagtttattatgaaacaattagttctgagacaaatccaatgtaacacagattatacaagattccatattagttgatactagacatagcttaatccgaccaattttctaataaatttcatgtttgacgagacccctccccatcgccccagagtttctctatgtttaacaaccctggctgtcctggaactcactttatagaccaggttggtcttaaactcacagagatccacctgtctctgcttcccaagtgctgggattaaagatgtgtgccaccaaatctacttaaggactgtttcttatagagagtatttatggcaacatttataatagcacgggtcaaaagccacatggcacacacaatccttttataaaccacttcttattttgaacatatatttgaattgtttaaatgaatgatgtttcagaaaaaccacaaacatgaaaaactgactttagcatctcctttgttataatgcactgtgggtctgctctgaacagacagcagacctctcactgggcagggaggtgccctgctccgctgcagctggttgtagaaggtgtcaaggagcgagtaatactcgtccagcgtgagtgcaggctgcagctcttcgatataaaccacctggattccccctaggagatggcttatttggtcttctaaggctgacattctcctctgaa

SEQ ID NO: 583 - DNA, 585 bp, Rattus norvegicus
  Genbank Accession No. AI170773
  misc_feature (1)..(585): n = a or c or g or t
aattgaattcatgtttaataattacaggcaccgtgcccaacccttccccctgccctggcagcagcaggggtggtgcaggggctggggcatatgcccccagcagcgaggacggcagtcccaagagtgatttcagaaaataaaaaaggaccctagaggcaggcggtagtgcccctccccccgcaaagacacaccaaatttcaagactttatatatatatctctgtgccctggggggaggagagagacacttggcagcatcctggaggggggccccaggcagccccaagccatcctgcctcatcagccactttattagctcaagacacatcgcactacaggcacccactgccactgccgccacagccgccgccgcccccctgcagtccaggcggctggctggctgggccatccacgtgtccatggctccaagtcccctgccccacccgccatcagttgtgatcagactcctcgtcctcagcctcacgaagccaattgaagaatgctgtgacagatttaagggccacacccttgccctgctgttcagcagggtccttgctgctctcccagctgtanaaggcgtcttcct

SEQ ID NO: 584 - DNA, 565 bp, Rattus norvegicus
  Genbank Accession No. AI171093
caagtttttttttttttttttttcttttcttcttttattccgttttacacgtccacgtacgtcatcatcacaacatcccatcaaaatatacaaacagcacgcgagactctaagtgtctaattagtactccaactcaacagggctgactagtggaaatagcatgcgtgggtcgtttgtcttgcaggatgcctaaagagggacttatttgtcaccgaatcaccaggagcaacatgatatgggattggttttctttctctcacaagagtcatgtacttcatttcttgtgcaacgggaggacgatgacgaatgccgacgctgacagagaaatcagccagaacaagagggaagagaaggtttgattggcagcagtaaactgccctgccttcgttggttggactttacttctgtgggaatgagatgcaccacatccgaaacatccttacccttcctgttggtgacaaaggctctgcacctcaccccttactttccgctgccttgtgaatttcagggctggccagaacgaacgggtttgtaaatctcaagtttcacgcttaacctcgtgccc

SEQ ID NO: 585 - DNA, 557 bp, Rattus norvegicus
  Genbank Accession No. AI171314
acaaactccaaatccagcatttatttcggtggaagagcagagagggggctcaacccaggttaggtcattcccagacagagacagctgggcaggagcccctgggaatgcctctctacccagctatgagtttggaaggaagagaagaggctaattctggtactgctaccaacacagctgccacagccagaagctgggagacctcaagcagcaagctgacctctagaggtcaggacaaactcagaatcaggcaagaatcagacaggagcatcagacactgcaagagcacacagactcgacaagtgggaaaagtcttgggggcccccaaacagcatcgatatttcacaaaggggaccccccccagggcctaccggctccagggactgaatgctcagggaagcactaccacagtgagatgctcacaaagaggccttgatagccccccgcccaccttgtgctgttcagctaggataggaacaggtctggagggagaagggaagaaagagtcaaaagcatgggaagaacactggcaggacatgggtcaggacatgaaaagggtc

SEQ ID NO: 586 - DNA, 576 bp, Rattus norvegicus
  Genbank Accession No. AI171361
gggttatattcacgtttaaaagctgttggcttatattacagcagatagtagatgggtgagatgagatgtgtcaacccttaatccaagtgtgccacctctggttgggatgaggagtgaggctggtgggggatccaggtctgaggacgtcacctaaacaaagggccactcagaaacttcgcccagtcttgcctggacatccaggtatgctctgatcctcgagccgctgccacagctgccgccgccactggtccataagccgctgctgggaagcctgggaactggtagccatagctaggagcaaatccaggatagcctctgccataggttgccacaaagttggggtagcccaacatccccatgccaagcatgaacgcgtccatggtgtatggcagcccccgggcccggcctcttgtcccaggtgggaacatgacttttttcggctgagctttcttacattctaccattttattattgatttcatggaaatgaattttacagactttttccacaacgtcttcattctcaaaagtgacaaaaccaaaccctttgtgcctgttgggggttttgtcgaacatt

SEQ ID NO: 587 - DNA, 531 bp, Rattus norvegicus
  Genbank Accession No. AI171526
catttattaagcctttattaaacacctccctgaaaggcccaggatgacaccaggacctttagttaggaccgagatgtaaatgcaaggacagcacagaccaaactacccgctcgttagttcaaatctgacatggctctccattcaaccagagtctcatgaacttgggagtactccggctcattcttcctgaaaaatctcaaaagaaaaccgcaactggaaacccagttttcaaaattgcttttaaaggccaacaacaagttggaaggaaaaggggcagaagaaataacctctctgtacatagtaagtctacacagactgccacagaaagccccttgtgtggacgttaccacctgctgagaccgctcccccctgcacggggaaggtcgcctcatagcttctcctcggttttaccatatactccagaggtatgtgtggggtttgttttttacatttatacagtttacaaagcttgaaccataaataacacttgtgagattaacagggctcagtaccgagtatgtacatagcccc

SEQ ID NO: 588 - DNA, 452 bp, Rattus norvegicus
  Genbank Accession No. AI171692
gagggtcctaataacttaaaactttattaggaacagtagcaacatcctgaggtcacaggagaagatgtagagaagccacagagccttggcagggttaaggtggtaccgggcctgatattccaccctttcctgccccaggcagagaggccagaaacaatcaaaaccctacaggcaacctacagaggagtaggctgagacccagaactggcccccaacccaatagtccagatggacactgggaaaggatggcttcaacccccaagacatggcctcttttctggaaacatgcgcagtcacacagctgggcccttcagtgccatccctgtgctaaggcatagctgaggcctgtgttcgaggtggggctgagggcagccttctcagggttggagctctttccacttgcgcagtctctaatccatggcctggaatgtggccttgtccttgacaaaaca

SEQ ID NO: 589 - DNA, 734 bp, Rattus norvegicus
  Genbank Accession No. AI171803
cacgtttttcaaaactgtattttttcctaaggcttttttatttgtattttattattcatgatcagtatagaagctcacaaaaacttgatgaggccatataaaaacaaaaaggaaaaatgctggttttctgttttagtgatattaaccttaatatagccaaatataaatttcatctaagaaacaagaaattcttttgagcactagtagctgctcgtatctgttgattataattagaagcaatacaattctgattagtcataattttttaaaagaaacttccttcatatctaaggaaaatattaggagtctagattaaattctatttggaatttagataataaccacttttcaacccagcccaaaattgttggattaaattaagtatgaactgtattttatgcagtcacgaagtataaatgtctactttgctttagggtggaaaacaaaagaaatcagagttgtggtttgttaaagtgaccgaagctctgaattctaccgaagccggttgctctaaaatctatatccaaagagtaggaaatgtcaaggttttcaccacctttatctcaactcaccaaagcccacatggactggagcagcactgtccacacatggctgtacagaacagagggaaataaatggccagcgccacatctcactaagcactaaagactaagcagaacccatagcctagttcagaaagccaaggcttcaggtcagatggacaaactgttctg

SEQ ID NO: 590 - DNA, 711 bp, Rattus norvegicus
  Genbank Accession No. AI171807
  misc_feature (1)..(711): n = a or c or g or t
gtatagaattagctttattagactggttttacagaaagcagccagattagtttctctgcctacctaaaatacaagttacgtgcatccagattattcttaaacatgctgtagcaaagtctgtatttaagatgaattctaagactctttcttagagcaaagagaggtgctccatgatacatcccccgagggaatgttcatgcagtgggcacaatggcaaactctcttccaccaggctcgtcttcagtgagctgtgttcatccctgacctcacactggtaactccctaccccaggacagacttcacactacaacgttcacagcagcgcacaggtacactgctcgctgtgagaggatgggaaatttagcaagtgttaatttcctggcagatacacatacatagggagctcagtcctgccgggcccaggcttccatgcccaacttgaatggtgatggtgccagccttgtagtgtgaattctggtctctctgaccctgacctggccttcctgtgcccgactttcatcatctaacttcaatcctggcattttagcaattctaggctggttttgccaagaaggcaactgaataccagagcaaagcacgtacagtcccatgaggattatacacgtgaaaagactcanaacaggattacctagtataaaaatataacgataacacatcacaagtagagtataaacagtcctctgagtgaac

SEQ ID NO: 591 - DNA, 495 bp, Rattus norvegicus
  Genbank Accession No. AI171832
tttttttttttcattgtttaatcacacaattttattagaattcagaccaaaatattaaaactataaaaataaagacactatttctctggaggtaactttgtttctcctttttatgtacagtggatccaaacttctacagcaaaaacttgctgcttttaggaaagacatacttgaagctaaacaacaaaaagcttgctgcattctggctggtaaaagctaagagttacccagcacacacagaagaagataaacaggtaagatatttatgataaagtaaggcagataggctttctttgaggcattagtaaataaatgaacttagaacttctttaaaagcgtaagtgtttaaatgcatagtattgtggaaagcacaagcgctcatttgcatatttacctttatacttcaccatgagaactccttagtgactgtcagccaatgtcgtaagctgcttttgcagtgtaaaactgatgtccatctatcatgtatatgccatc

SEQ ID NO: 592 - DNA, 551 bp, Rattus norvegicus
  Genbank Accession No. AI171980
gaatgtagtatttattttgtgaatttacatgtgaagccatttacaaaagtaaagattcagacagatgcagctttcagtgcagtttcaaatatgttcacaacaagcaaaaacgtttttgagtattcggaatgacagtattgaatggcacatgcttcagtgtttcctacccaaccccaagaaggagggaacaggagaagatgtccctactaatgtaaatacaaccatgcaaataaagactcttaagcgaagggtcacattcagaggtgtaggacatttctgcatttagggctatcatcaccggagaattatttcacaacacaatggagagctctccaactgtccattataccagtcgtctcaaactatgttaagtgctcctattggcttaccagcattgtccaaaaactgactttagaaggagtcatttctagtatttcctaaaaagacagcatctgtagacaaaatcatttggtttcagtgggataaagcacccttttaaataagagtgtaaaatgctcctatactctcaacaatgtaaactataattagac

SEQ ID NO: 593 - DNA, 660 bp, Rattus norvegicus
  Genbank Accession No. AI172057
aagtggaactttctctttatgacagatcagcataagcaccctgcggagtatttcttataaaacagtataacagtgatgcagaatgatctcacaaagccatcttcggacctgacatccgggctatagcctaagagcctttagcaagtgaccgatcaatcacaacattactatgatgctcattatttaccaggtaaacctgaaataaatcaacaaaataaaacaaggacaaaatccaagatctgccaaacgacgactgtgtttagtaatgggaaaaacactgaatctgagccggtccatctgaattcttgtctttgtccttggatggatgatctgagaggacagccttggttaagtctttcagtttaaattgacagagctgcttttatggttgtgtacagtctttttctaacaacgcaaacttggcaaccaattcgacctgcatataccatataactcctgtgccctgtgtcatctcagtcctcaaattaacaaacatcgtgtggttccttaccagacacaaactcgagagacatggtttcatgacagattacaaagtcacggaagtccgaagaaatatgagttgacctcagacatccttcttggtgaaacaatgcaaggacttacggagagaaacaagcgagttcatacattaattacacc

SEQ ID NO: 594 - DNA, 719 bp, Rattus norvegicus
  Genbank Accession No. AI172184
attttaacttttttattgtttgcttattaaacatacattctcaaactgacactttgccatgaataaagcaacaaaaataaggcaataccataagatgtgctttacatacaaacatcatcctggaagagtaggaagtctgaatccatgtacaacaaaaaaagccaggaacaaaaagcactgtattctgaacacacacaaatgtgtatgtatgtaaagacagcacacacacaatacagtttacttgggttctttatgagcataattccttaatcatcctttggaagaatgaatcttaagaaataagaaatctgaactgcatttattttcacaatatcaatgttaaacttaggagaagcaacttcattgactaaatgttaaatatttcaagagtaaaaggcaaccttaatttttagtaaccctctaaacagggtctggaaaacagtaggttttcctctcttggtatgaacaaaggatggtaagcaagcatcattgagagtgtggacacatagaaaaccatcttgggaaccgtgctcttcacaagcctaagaaaccaccagaaataatgagtagaccccatgcaacccaaatgcaaagctaactctatacatgttacaattttcaaactcttgcttctaagacaattttagtacacctaataagtacagcaggtcatttagaaaaacagaaacaaaatatatacccagtctttgcaattcaaa

SEQ ID NO: 595 - DNA, 602 bp, Rattus norvegicus
  Genbank Accession No. AI172193
caggcttaatatactttattgtaagcattagtgaactttttgattaagaactcagccagttgtgttctcagcaagatgccctaggtgggccctgactacatctggctttatgccagactgtgctggatttgccacaccataggtcagagagggtgtggcagacatctagtgctcatgattagagcttggaggtgctctgctcggcttctcaggtccccaggagcttcagtagcctgcattggaagcgagagtcttcaggatgtgtcttcaacacttggtacacctctacggggggcttcaagcccatctgctctgcccgatgccagcgctgcagccttgtgatacctgtgcaaggcccatactgccaggccaggtcaaactgcctcagcaactccagctctgtttcctcctggctgagggactgggtgtcttcccctagctcgggtgccagctcccccttgttgtgcccagggggcccctccctcttcttcacaacagggtaggagtctgtgatgaaccgcttccgacccatggcggccacccaggcaggcggagcaggaggcaaagaaaaggcagggcagcgggcctgtgagagacagctg

SEQ ID NO: 596 - DNA, 668 bp, Rattus norvegicus
  Genbank Accession No. AI172206
aactttaaagactggatttatttggagaaaaacaaaaaaccctcaacccaaaggatgggattttacatctcaagacatctcccaagtaatgtctacagattacaaatcattttcatagaagatatttttgtacaaattttacatgtattcaggagcgggacataagtcaacccctgttcttattttaacagaggaaagtaggagagtgggacaaaacagctgtcttttggatgcaactatctggaagggaaatagacatgaagagggcaaactaccttctcactgtctacaacaatggtttaaaaacccattcaacctgggtatctctgcaaaagccctcctagctactagccaatcaaatccaccgaagaaatttgctgtgcctactgctgcagcacgtgacgtcaatgctcctgcacagcaggcctaggaacttgtgctaaaaccaaggtctcatctgtctgcaggtacctgactacccacaacagggaagcttgccatcctcggagctgagctacaaaggtgcacatcaagacaggctacagcgctgcacgaggaactcggaccctggccaacagttctttgcatcctcctttactctggaagggagtaaagacgccagccctcctaggcagaaaagcagtgacaactcaggcaccggtgtgggg

SEQ ID NO: 597 - DNA, 631 bp, Rattus norvegicus
  Genbank Accession No. AI172208
cccattcaggaaggtaactttattcctgcatttcccccagtcgtcagtattctcagaagtggcacagacagctccatgctgaccttgaagtctactgtaggggccaacagcagttcccagggaggtgtggctgcacattaaattgtctggaggccgtgagtgttctttgggttcgtgtttctgccactgcacttgagagacaggccttgagctgggagagctctgagagactgatctgggtgtccatgtatcatctgctgagggaaaggaaagatggtgtggaccagccagtgttcttctacagcactgagccaatgagaaggctctgtgtcaactgtcaccttccacagcgatgatcctacaacaacacgctctgggatgagtcagcctctaagagggactggcacctcatgatcagctgaggtccctcttgttgaaagcacgcttctctcctctgtgcgtggcagcacttgcccagtaggagcaggaaaccctcgccaatggaatggaacgcctcctctgccgtttgtggcttctgcttcacgaggttactgaggagcctaaggcagaagcggggggacaggcattagctcctgagtttgcagggctgtcttactgctttagattctca

SEQ ID NO: 598 - DNA, 730 bp, Rattus norvegicus
  Genbank Accession No. AI172302
gggttttaattaaataaacttttattttagaatgactttagattcacagaaaagttgcagagaccaaagggttcccatatatcttcatccagcccaccccagagatatgattacaaactggaaggtaactaagacccagacagtatgagtcctggttgacctgctaaagtgctttctctccctggtctctgtttggtcctaagaatcaatccagcaccacaatacactttattcctttcaatctcattctctgggacactcagtgggtggggaagctggtgacctcactattgagctgggaagacagaggcttgaaaatgacaagcgtagcaagtgccacctcaccctgctgcttccgttgccttgtggactctgggtttgcggaagcccctctgaatgccccgttatccacctcattctgcttatgaatcatccttggagtggggtacccagctctagaaggcaccgtgccacgacttcttctaggttttaagaaccttacttaaaggctgacttggcccctctgtgtgcttatcaataaacttgtgaacgggagtgcttatgtgtgggagtgagaaattctgtctcttgtccaccaagattcatctgtgatgaaagatggccccacgttctttatagttcctcccattgagagctgggtccacttgcacccctggaatctaaggaatgaactgaccagtggagacacagtcctagcaccggggcttga

SEQ ID NO: 599 - DNA, 609 bp, Rattus norvegicus
  Genbank Accession No. AI172414
tgccattaagttcagatctgaattacatatggaaaacaccgctacttgttatcactggaaattatgtgtagacatgtgaccaactgagggttatactatagtcattaaagaaaaagtcaagaattttgaggacttaagtgcttgtagttataaagttttgttcccttagattttttattacacaaatcccaatagataatatacatattactacagattgctatagataacatcattcaaaattattaaattagctgcatattttgaactactcctgatgaagacaaataaagtttagcattgataaggcagccgagagttggtttggggattcttggctattcaataatgttggcatggtcattaaagatagtcttccgtgttttcccctcagcacgactattcatgctgacgtgatctgtggccgcaacagtggctggagcactgtccctttcaagagctggtccttgcactgctatgcaaatggccgcttactcatctcgtagttgataagtcgtcctccctgaatgagctgagcgacttcgtttgtcacatggcacgcaaacagaagccagtttcggggttgtacctttgtggcaaatctcatga

SEQ ID NO: 600 - DNA, 610 bp, Rattus norvegicus
  Genbank Accession No. AI172615
  misc_feature (1)..(610): n = a or c or g or t
tttttttttttttttttggtggtgcacgtgtttaattctgccatttgggatttaaaaaaacaaaaaagttcaggccaaagcttgtacatggttgtctataactcaagcaattggaaagctaagaaagtaaagtgtgaggccaactaggatacacagtaatgttgaggctaccctggctatgtaacaagatgctctcaagaaaaacaaagagaaaaaagagaaggagatggaggaaaggaagagttaccccagattccagatttggaaaaattggctttgtgtgtgtttgtgtttcttgtttgtttgacatagatcctcatacacacgcaaatagaaagacattatccaattattttgatgtggctaatggctgataaattgtggttttgaaaataacaatactcgtcacatgagagaagagttaatttggagtgaaaagacagccatgatatacacaatgcttacctgtggaaggcagggctttgaactgagtaagtgccatagtggttaacagtcctgactccagnggaatatgcattctaaaccatgtcagttttgttaagttgcatctgtctttgttgctattttgaaacataccttactatatagc

SEQ ID NO: 601 - DNA, 430 bp, Rattus norvegicus
  Genbank Accession No. AI175319
gcttttcttcagggctagcagtggctgtcgcggctgtgtctagcgagtggcagggagtcgcagaagcacttactatttcgttaaaacatagcacacttcttcctgctcatcaaaggggtgaggaaagactgtttccaggcagtgcaaactccaccgtttacttgtggtggtgcctatgccttgtagttgagacacccccacctctcagcccactgggcttttgtgcgttttccaggagtgagtgacaagatgctgatgggccaagactgccagaggaccctggacacaagccaaggcagctcagcccctagcagctatgctaatcacaagtgaggctacccagactggtggaggactgatatttggtatcaggtgggtgacagtagggaaggggcagaagggaatgaggaattgaagttctgggatccta

SEQ ID NO: 602 - DNA, 382 bp, Rattus norvegicus
  Genbank Accession No. AI175466
tttttttttgttggcagtgatatttattatactgacagatgggagttatatacagcagtgacaagatgcccctcaccctaccagggtcttgtgggggaaaggaggaggtattgacagaaggcacatggtggtagccccaggaggccagaagtaaaggtaagagggtgtagtgtgtcctggggaacccagaggttgaaacagaggctcagtcagagagagccttgggccacacagcaagtgtgaggcagctggtcccgagagcttgtgctggtcacttgaggctacagcaggacacaggggcacctcccatccttcttcctaggggcactgggtgggctaggagggagttcttgctcctggtatttccggacagtccgcacca

SEQ ID NO: 603 - DNA, 421 bp, Rattus norvegicus
  Genbank Accession No. AI175959
atctcttatttacaaacactgggtaggacacccaaacaaacaaacatggaataacttacaaaggcaggaagctgtttattatagacagtaatcagctttcatcaaattaaaaaaaaatatatgtacatacacagttgagagaggcaggccaggggagttcatccgcaatctagcctggtactcacaagcctccctccccttcccagccctccctgctttgtgttcttacggagcactacagaagcaatctacagtctctattgcagtttgtaagcccccacccaccccccttaatactgaatgagatcgaatgttaggtccatgcagttcttggtcaatgttaacgaaaagtccatcgttctggtcgcgcgggcacagcccgttcgcaaagcgtggcggtcaacaggccgctgctctctgg

SEQ ID NO: 604 - DNA, 653 bp, Rattus norvegicus
  Genbank Accession No. AI176007
attgttacaaccaatgtttatttacagaatataaatctcttcaaaaagatacattccttcatttaatcaatggtagaaagccttattaaacagaaataaagcctaagccgcactttatctcagaagaagattgcggcttcattgcaagttcatgaacacagaacacaaatgtacttcactcagcagctacgtcaatgaggctgttgattctcactggcaatgccattttatacatggaacaaatcttacttaaattaacagtagtaaaaattaaacttcaaacataaaaatatgtaacaacgaaggaaagagcaggaagtacgtctgctagcaaacaggatacgcaagttctccgcactcagacactcggtgaggcgtagggaaacctagctctgagtctctggccaggaagcctgtagttccaatcggatgggctttcctgctccactttcacaaacggctcaagagacaatgtggtgttttcagttctataactacctagtgttttattaaaacttactgaagggatctaaaggacctccatgggtaagacaaccaaaagatgaaattataactattttaaagggtatttttgcaagtacatacgccatataatgcacaacggacaaagatgtgttggtggtaccatcatg

SEQ ID NO: 605 - DNA, 425 bp, Rattus norvegicus
  Genbank Accession No. AI176140
gaaaaaaagaaagaaaaaaggagcagttaactccttttattttctctgtttaaaatcaaacaggaaacaaacatcaactctgttatacactaacggtcttcaaagtacatcatttgtacaagagaaggactaaaaaccaaactgtttacagagatccaagcacgagtgagagagcacactccttacacggctttccgatgatactcaggaggagccacttcataatcactggcactgaacagagttgcagaattctttgccaggtacttgaggaaatcatgtagatagttcagtaataaagcaaggcttttctcatctagaggtgtataggccaacatcgctccaattcgcacaaacaatctcagtaagtgtggcgctccatacacctgggacatgggtgcatccgggtgatcggccaaaatttc

SEQ ID NO: 606 - DNA, 469 bp, Rattus norvegicus
  Genbank Accession No. AI176170
gaaaaaagccagcataaagcacttttattgcaataataaaacttgaaccgcatatgtagtgcaaaggcaggggacaaaagctttctctcaccaaatcactacacgggacagcagagggtgaaaaggaactgaaggaggaaaagccaggaagctgggatcagcagagagccaagcatcaaaacctgggagatgctgaagctgtgatgaccagcatcattttcttagagaacactcaaggatttgttgtggtggctgggcatccactgggtggtgagtctacaaacagcaccttcagtttaaactttccaccgaagttctagaatttagtaagtggagcgtgatagttacaagattacaaaagtccagaaaatccattagaaaaaccataggatgaaaaacaaattaagccaggtcacaaagaaggcttcaaaggtccctgccgacccagggacagatattgtagtgttca

SEQ ID NO: 607 - DNA, 430 bp, Rattus norvegicus
  Genbank Accession No. AI176422
ataaagttttattaatgacaaatatttcatgattttatgggacgttagatacaaagttttttacttcagtgtttgaaggacacttgttcagaagttatccaaacatatgggaggttagtttggcatacatttacagtattctagaaactggctgtcaagtgtgccagtaagtggaggcacttgggctttacatgccattgtaagcaggtcctcctccaccttctgggaccacccagttaatattttgacttgggtctttgatatcacatgttttacaatgcacacagttctgagcatttatctgtaaccgtaagtctgggcatcacagctggccctcaaatcaaactttttataaagctgcttggctaggtgtccatggcagccttctgcaaagattgtgactttggcatgcaactccaggcctcgtgcc

SEQ ID NO: 608 - DNA, 370 bp, Rattus norvegicus
  Genbank Accession No. AI176456
caagtcaagtttttttattttattgtcagttacatgctttatagaaaaaagtgtggagaaccggtcagggttgtacaaaaaaaggctaggttcctacgttgttttatttacaccattgtgaggacgcccccacttcaggcgcagcagctgcacttgtccgaagcctctttgcagatgcagccctgggagcacttcgcacagcccacggggcagcaggaacagcagcttttcttgcaggaggtgcatttgcattgtttgcatttgcaggagccagcgcaggagcaggatccatctgtggcacaggagcagttggggtccatggcgaatggaggcggcagttggagatcaacgagagatcgctcctcgtgcc

SEQ ID NO: 609 - DNA, 590 bp, Rattus norvegicus
  Genbank Accession No. AI176472
caaagaaaccaccgagatgtttatttatacaaatgaacagggagtgaaggtaggtcacgcaaaggcagagaacttttaataacactgtatgaaatccccgaacaatggtggtatgaaatgttgcagcccgggggccacagaactgttctcattgctttccctaaaataacactacaagaatgtgtcctaagaaaatggctgctcctgtgtgcagccccaggaaagcagtttaaatgaaccgaggactggtatactcatcaggactaaacacactcagataaaatcatatggaaagtctttagagcacacctaaataaagaggaaaatataatataaaaataaaatccaaaatgaatgcaataagatggtgaacattatgggcattttaaaaatctacataatttctccagcattttcaaacaaaaggaaaagacaggctactgtttctagaacttgcttgctttttcataaattctactctcttctatgacaagagtgtagacataaattttaaattgaaaaaagaaaaaaaggaaaaaagcagcccctaagctgtgtagtctattcagatttgagctgttcatgaagac

SEQ ID NO: 610 - DNA, 630 bp, Rattus norvegicus
  Genbank Accession No. AI176473
gtagaagaaatatttaataaagaaatacagttcaaatacttaaaaataattatgtaaataccaggtagacatatgaacaaagatgacttctgagttaaataaattaaacagagaactataccaataaataagaaagtcactggctgaaaacagtcaagattttatttttcaatattatttcatttggaactcctagaataattttctccaaatgaccactctcctgtacccagaaagctctggccagggctcctagactttgctgcattggtcctgagacttctagactgcattagtgcttctggctggtttgaaaccaaatttcactgttcaccagaaagcagctcttaatgcattctaattctgcagtcaagttacttaacttataggcagggctggggtgagaggggcacttaaaataataaggtcactctaagaatgttcttccctccattctcggttgacacatgaatctacagagtaaatataaccttcccctgggtgcaaggctcaacccgaagcttctggctggcctacaggattcagagccaaggacactgcctaaaaagctaggctacagatgtagctccaggaacctcagccaatgaggctttgccaacctgtagtaga

SEQ ID NO: 611 - DNA, 715 bp, Rattus norvegicus
  Genbank Accession No. AI176483
  misc_feature (1)..(715): n = a or c or g or t
gactgactacaaagactttatcaaattattgaaaatgttggcatttaaagtattcatgcgcatacataagttacatggaatcttcgggttgtaggagtacaaatacgatggtacacactgtgagcctggcagtgaagcaaatgaaaccagacttaaaacaaaaaaaaatcggatgtcctagtcaggcatggctgaggcagagggtcaggagttcaaggccatcttcagctacatagtaaggtcaaggcccatgtcatctacctgaaacaccatctcaaaaaaatttttgtgtgtgtgtgtatcttcttttacctgtaggacaagggcagagggggcaccatgtggggtggcttcattccactgctcagatttccccttccaacctctgggagaaaagggcctggtattcccactatgtggaaatcttgatatgggaaacaccaagaacctactggaatatgtccttataaatatatttatatcagagaaaacaaggcactttggtaacatgatagctttctctcctatgtgtaaatcattctaggcagaaaataaaaattggttagttcctcaggtcaattaactgaataaagttaatacaggaacagaattgtcctcagccttcgctgaggccccactaaagtgaacgaggcangaggcacagaagcacttctctgtgcaacacctggtcccaggtcggatgggcaccagccaa

SEQ ID NO: 612 - DNA, 678 bp, Rattus norvegicus
  Genbank Accession No. AI176546
atctcatctgtatttacctttttaaagcagaatgtgattgggcactgttattttcacattcacaagccttgctgagttacaagacctaggggaacttagggttttgttctcagtactttggaaaacaagccacttggggaattcctgtcaagttgttttagcttgtgtttacttctaagactagtacatgcagaattaactacagggaatgaaaaaaatttaagatgaaacttaagtcatcttaatttggtctactaaaggaatccagctcaacagctaaacacttcagaccacatagttaacagtaacagtaggttacattacgtcttacaacaaacgttctatcaacctcttgagtcaaacctatagtatcacagtatcacatgtagaaatttttaccttcccctagttttcatgccacacagatgttttaaatgttaacaaaaataaacaaaaatcatggaaaatatattatcagaaggaatgaaggtaagcatcaaacacatagttctggtgaagcctagtctacttcttccatgcgtgatgtgtcatcatctccttccaggggtggcatttcttcagttacagcagcactggtatcatccacagtaggatcatcctcatcaatacctagaccaagcttgatcatcctgtagatcctgttagcatcctcgtgcc

SEQ ID NO: 613 - DNA, 478 bp, Rattus norvegicus
  Genbank Accession No. AI176839
aaaaacatcaccaagtcagatttttatttctacagacagaaggccaaaagtttctatttcagtagcagtgtacaccaaaccactcctccccagccaaagctgactcttctttgcatcctgcatgcctttgaaccatgcccagccttgtgggggtggcagcaggactagactgctattctgtgttccaaggggtacctgaaagcaagaatagaccaacactggcatccgtgggttcctcaggccaacgcgctcccctctgagttcaccattcattcaaagcctggtcttggccgtcagcaaaccttgagacttaaggtgctcggcgatttctcatctccctggaggaccttctctccctccgacctccattctgtactgcttgatcagtccagccatctgcaaatgaatatcacagggaagagacctatcgtaaccacgagaacacctcacggagactcacctcgtgccgactggtgcc

SEQ ID NO: 614 - DNA, 645 bp, Rattus norvegicus
  Genbank Accession No. AI176849
aaacagttcacatttattattgtaacaataaaaaaatcttttaaagactatcagtattgtattaccaagagtgaggtaatatgtttacaaaacatttacagaatttgatatgcaaataatggttcagggaggagtgagttaagacactagaaacaggagagcccagagagtgcagggagcagcatgttaggggagtgctgggcactggacaagcagctctgtgagccacacagtcacctcacagccagcctccctcacaaggcagccagtgccctgtggcctggggaagctcaaggcctgtgaatgtgtagttgtgtgctttgagctcttaaagatgctatcagctctgagggggctgaacagagacacttctgaatggacttaaagggagcagctcttcagcctggggcatggctgcgactcagataggtctacaaacatccctgggcacatgtgggctgtcgagtgaagcgctttcttggaggttgtcagcaaaatcgccatctgggacatggagaaagggagagggaaaaggagagagaagagagaaagagcaggggcatcttcaggtcctttcgcttggagctggggagccctgactgaagcagtgtggacgcggcagccacaagcccgctgtgcgtgtac

SEQ ID NO: 615 - DNA, 536 bp, Rattus norvegicus
  Genbank Accession No. AI176969
aaaaaaagtaagaataacaaaaacaaattttaacaaaagtcagggacagttttttcaagcaacaaaatcctggggtgaggaaagcttactctgaaggtgatcggaaactggtaacaatgtaataaaaatcgagaattgcatagcgctgcacgttcagcctttagcaaaacaaaaacagaagctatttggtattgatacaaatccatctatttgatagttagtcactcgttattatgtacatgttttatatactgaatgtcatttttaagtccccttgtccacactctttttctctgttggcaggttgttggtttgacaagcttgaacaaaaaggttttctggtgtttttgtttttcctccgaacgcactgcatcgatgttctctctctgagcagacgcggttctctgctacatgtcatccgttcatttaaaaaggaaacaatccacagtgcgatgtgtctgggatcaccacacccattgacacccaggctaaaccaggctggaccgatcggccccaggtgcaggctccttggccct

SEQ ID NO: 616 - DNA, 492 bp, Rattus norvegicus
  Genbank Accession No. AI177042
atgaatgaggcaatttattaacccagcatcctttgttctaatgcttcttgttggcagctgccacctgtccggcgatcctgtccagatctctctgtccctgaggtgttagcttgcggcccccatcttggtccttttccaccattttcagcccctccagggcttggaggacccggcgggccacactcttagagcctctgctgaagtggctgggcctgacaccgtttctctgccgtcctccgtagatcttggtcatggaaccaacccctgcaccaccacggaggtacaggtgccgtgctgtggaagcagctcgtgtgtagaaccagttctcatcatatggggcaagctctttatgtttggccaacttgactgtgtccacccattcggggactttcagcttcccagactttttgaggaaggctgccagagctctgacgaactcctgctggttaacgtcttttacagtaactccaggcatcgtgcggcctccgcgct

SEQ ID NO: 617 - DNA, 620 bp, Rattus norvegicus
  Genbank Accession No. AI177093
gtcataacctacttttattccatatttcaaatctttatgcatcaggaagttacagaagcacaacctagtcacactctcaattgcttcttgatacaatctgaaccagcagacatggtttttctcttatattaaaggctgctttttatttaatgactggatatttaggcaggtcatagtttatgaaaccatgtctaaaattttcatttccattcgtgttccaagaagcaaaaatttgtaattgttagcaaaggtccaaccgcggaggttccgttcccatactggaaaatcaactacatacataatgctgcagactgtacagatgtacacactggagagctccacaggacgtcagtcagagtccactgtcggtctgagagaaccagtgagttagtgtcccgatcaaagcccaagtcaaattaacttttgtacaggcagttctgattgtgctgatccaggtaatgcaggggtggcaggttgggtgaaggtaagattttgcttttattttcaccaaatgctgtctcacttgatttaggagggcttgggaatacccaggagttatcttccagagaatttctcccgtaggagttgtgctcctgaaagtctgcaccgtcattaggaga

SEQ ID NO: 618 - DNA, 568 bp, Rattus norvegicus
  Genbank Accession No. AI177119
agtgatctatttatttttctctcttcccacctgaaaaaaaaatagtctcataaaggtctcgataaactgccactggaatggaaccagtcagtgattcccagagaaactttgaggagacagagggctgatgggtcaggaaccagggtggacttcctgaaggaagaggtctgagtgaggatggggaaagcagagggagcgaggcgggcgtccgggtgctggacccagcctgccattctagtcaggaaacagtaggaaaccagagaagacgctgtcagagccctcagtgcccaccatgccgttgtagtcgttgacggccagccacaccttgtcgcccctctgcagccgcaggagtactcctcctgagctgacctgcttgctgttggacatgtggtcgcaaaagctggtcaccttggcattgttgaggagcaactgcacgcacaggttggccgtctgggatgtgtggtggaccaagtagtagaggccgggcactttgcaggtgaacttccccgtgtttgtgttgtaatccccctgaggattggtgatggcggaattgaacttgacaaggcca

SEQ ID NO: 619 - DNA, 563 bp, Rattus norvegicus
  Genbank Accession No. AI177181
atacaaattactgtacagtcattttaataaagtgaatagtaagtcaaggtagaaaacacgaaactctgatgccttccttagagacacagcaaagggactgtccatggccccggttagtgacagagtgaacagagtctagaaacaggctaaggcattgtgaatgggctattgagaacggaagtgcccagtgctaaaccagggcctgagtgatcaccacccaatctgtttctgtgggaacagggccaaaaatctctaaggaacctggaaatgtacagaaacgtggttacactaaacctggtctagcagtgctgtcctgcagcttctcccaaccctactgaagtacccatgatgcactgcgacagaagctctttaaagcattaatcagcggtgtacacactaggcgagtgaacactctgcttccagacacgtgaactggatttccaagtacacacagggcagaaccccgagtgcacaggcagggccagctgcgtgggctctgtaacccgatgtgcccgagctcaattcccgtgtacttactggttgttggaaagacgacaaaccat

SEQ ID NO: 620 - DNA, 636 bp, Rattus norvegicus
  Genbank Accession No. AI177360
catcaaatacatttattgatttaagggggagaggcaatcttaattattctcagaagttaatatccttccttgtcatttaaatcatggctatttaagaggaactgaataatactggagctgttatttaacctgctgtcaggtctctggtagaaactatatgaatttaggaagccttaatttgccttagggcagccaagaatattgaacagatgataggatttagtgaaccacatagcagcaagtgatgccatgaagttgatcgaggaacgagagtacagaagaagcattccgaaggtacagtgaaacagagccttgaaatccatggctaagaactcctgtgagccagcagcacattggccagaagtgttcgtagaaactgacctggggcttaacacagcccctgtccagggacaggggagaaaaacttttctatgaggagtagtaaaccaaatcacaggttttttaattttaagtctcgctgattaaaactaagaatccttggcaatattttttaaccactttcttattggttgttccacacgtgcgtgcacacacacacatatacacgtccaagtgtgtgctcacagacgtttacacatgtactaagatacttcaacatcagttaacttatacatt

SEQ ID NO: 621 - DNA, 618 bp, Rattus norvegicus
  Genbank Accession No. AI177366
gtattttaggccttttattttaataaataacttcagttaacagcactgtcaaaattaaaaggcacttaaaacaaggtggtgactagcttgagtcagggcgagcacagcagggaaggcacgtgcaggaggtgcacagtggtcgaattgctgctgaggggccctgcccaggccctacagtcctgcaagcagcaggacggcttacagtatttgtgaaaaaggcaaatgtacagccacagaaaagaaaaggttataatagagtctgacccccaaattgcaaacagacacattagagattagaggtgataaaggagcaccaggaattaaagaaaaacaaagcagaacaggcccctgctccacaatgctactaaagttatggccttatgtaaatagtgctaagtcagggactttttagcagagaagttcccagtacttttatccaagcttggatttataaagagaaagcgttgggagttacaggatcaagtaactcacaatggcacacaggttttaaagctaagttttcctttccacatctcagaatttttccaatggacttgtaaatcaactgtgtcaaatttattttaattggaaactgtcaacacacttgtcttccgcacg

SEQ ID NO: 622 - DNA, 520 bp, Rattus norvegicus
  Genbank Accession No. AI177386
aggtcggacgaatctttctttaatacaaacttggtttatctacatacagggctgtcacccgctgcttctgcccaaaaaacaagcggggacgagtgctgacccactctcctacaaagagagacctcacttgctctagggggctgcgtgtcccccaagtgtcccgtagtcccgggggtcctccatgcggggcatggaggtcaggagaggacaaagaccctctctggtgcgccagggactggggcagtgaggccagccactgtgtcctggtggccatgtccctgcagcctggcccaggtgctcccagcacctcacccttcacatctgatatgtctgaagattgatttaaaaaaaaagtaaaaagggtaaaaagaaaacctacgtgagccattcacacggggacatgtgggaagaatgcacacagaagccatcaaagttgttgcacagagccgtcacacgacacacttactatgaaaaagttggcctcccacagaggcacaaacagtgatctcgtttgtttttc

SEQ ID NO: 623 - DNA, 601 bp, Rattus norvegicus
  Genbank Accession No. AI177428
acactctacatgcttttattacaagactaccgagcatacgagggaaatccatcatccggtaattacatctaaagcacagatatttgaaaaaaaaaagaagttgtttcattaaattatatgattaaaccatgaccaaatagaaaatttatataataaagccaggaaaaaagttgtaaaatatagtttacaataattattcacattcaaggctgtacatcaatacatacaacgtggccccaaacatgaattcaatccaaataattcatatattagaatttaaataatacagactgaactagaggccgacaatagccagcaaataaccttatataagaataaaaatacaaaagtgtatatcctagtatcattgcattatctgttttcataagtatttttaatttttcctttgcctgtacatcacagttacagctacagaccaggtagagaatattacatatgttctaactgactgccaccaacctgaatgacagcaatagactattgattcatcctactgtacgtggctagggaatagccgcagcagctctaaatactgtaacaatttttgatttgtgccatgttcaatcacactatggtcata

SEQ ID NO: 624 - DNA, 454 bp, Rattus norvegicus
  Genbank Accession No. AI177482
ggacgtggaaaccaggtatttaatattttcattaaattgtttcaatacaattcccaacaaatgccaactgcaagacaatgtccaaaaactctgaagaagcaagctcccagacaaggaacaaggccatcatcttccactctagccacaatacttctctccatactcgtgccagtcagccagcctcatccagattatcgagtatttaccacatcatcaattttcagaatgctccgcacagtttcagttgctagggtcaacgcactgactgacaccaacagaggctggacaaccatttcctccagaatgttggagatcccaccctttcggacattaatgcctgtagttttttctccttgggcatggcggtttcttagctctgttacagtagagatgggattcaggccagcattttcagccagtgtagatggaatgacttccatggcatctgcaaaaa

SEQ ID NO: 625 - DNA, 491 bp, Rattus norvegicus
  Genbank Accession No. AI177510
tttttttatttttcagtctgttgttttatttgttaaatggctaaaaagtcatcggggaaaacattaacaaaatgaaactgacagatttaaatatccatggaatccattttcattcctacactgtgatgtgcctaaaatgactattggagtgcgccgccgccggcacccctggttgtatgggaaacatcactcacagcaccagctttgccagggcacggtgggtgcacgctgacgggagccctggttggtaggagggagtgccaagaccactcctccacagttgatggtttcagtgctggccagagctcaaacattaaaatcagaaggcagggatggcggagtcctcatcccaggcaaggaagaaaggcagaaacaggagtgaaaacgaatgttcagcacatacatctgcatgggtttgcagttcatactctggtacaagggcttgccaacattgagggactgtgggagggtggtggcccaggcggcaagca

SEQ ID NO: 626 - DNA, 434 bp, Rattus norvegicus
  Genbank Accession No. AI177683
tttttttttgaaaagttaaaaattccttaattttttattcctggtaccactaccacaatttacagggcaatatacctgatgtaatgaaaagaaaaagaaaaagacaaagctacaacagataaaagacctcaggaatgtacatctaattgacactacattgcattaatcgatagctgcacttttgcaaactgtggctatgacagtcctgaacaagaagggcttcctgtttaagctgcagtaacttttctgactatggatcatcgttccttctgtggcagatttttacagttcctctaatgcatttaggacgactgtctcaaagtaacctgcagctttcctgacaactcctcgctctctctcctgctaagaactgtagccgtttgttttattttaaaaccttctgctaccatatccaccacttccaccctcgtgcc

SEQ ID NO: 627 - DNA, 590 bp, Rattus norvegicus
  Genbank Accession No. AI177755
acagtttaatatccaatttaatttttaaaaaacttaatgaaaatataacagaatcaaaacatttaaaataagtacactcactacccactccagcagttcatttaagtcataccaactatagaatatgaaaaataaattcagaagtgtaattactttaaaatacactgcttccacttttaatattttacatttatgtatatattctatagtggaagcagaaattctctctaaaaacattatcttcttaaaatcttgaggtgcatattagagccacaggcaatatccgacatataaaatcgcagaacaggccttcgggatttggcatcactggtacaatacaatgaccaggctacagaactgtacaatgcctaaacatcgcggaagaaccatgattctcttcagtggacaatgattactgcatattctacaagggcagtgatgttagtaattctgttgggtatatgtcctgacataatttccaaatgtacaacaacacaaacaactctgttaaggccatgttttatttgctgattaatggacaaaaggcaatgtaatttatttcaagtattttcttgaaagtctgtgctcat

SEQ ID NO: 628 - DNA, 605 bp, Rattus norvegicus
  Genbank Accession No. AI177867
gcctctaacgttatatattaaaaatatcatggttcttgtgcacaaaatcccactgttcacatccaagcatcacccatgcctcccctctgaaccctagaacagctttaaaagaaagatggtggttttcctattcaagagctaaggaaacaccgctcagtctttatggaccttgaaaaatggtgaccccttccctcccccaatctctgcccctccaggccccagcccacctgggcagacaaagaactggcgggtagaaagtgccagcagccctggaggtgtggggtatctcaggcacagaagtcactcatgcctccgtttggagggtgggatgagatgtggaggaaggtcagcgggcagctcatggccctctagcttgaccttgataaggtggttggccagggcaaactcctcgtcatctagcaggccatccttgtccacatcagccagcttccagatcttccccagcactgtgttaggcagcttggacttcaccatctccttcttggcattagcgcccgtgatcttgccattgacaggagacagtgtgtagaagatctcatcataggtgggcttgtccttgccaactacccacttaacatcatcaa

SEQ ID NO: 629 - DNA, 402 bp, Rattus norvegicus
  Genbank Accession No. AI177902
gccaagtgagccctggtttattgaccacattttacactccaggaaacatgtggaaactgaacacagagttttgctggaacatggtgtaagcagaatttgggcaggggccaaccttggaggagtcttatgtgggtcttccaagaaaagttaccatttttttccaaaaaaaaaaaaaaagaatcccacagtagggagaggtttaaagttctgcaccaattacgggttgaaagctgttgttcgtaggggccaaccagggccttagttggcctaccagtgaaggcctgagggtggggtcttctcgtccttattgctttccaaggagaagggtgggatccgaacattaaagtgggagccatcaggtctttcaaaacgaaatgtgccccacatgtgcccactggaagc

SEQ ID NO: 630 - DNA, 501 bp, Rattus norvegicus
  Genbank Accession No. AI177962
agagttttagagtttaataatctggaatcttgggaacatatgatatggaagcttaagaatctagaactttggaccaaattttagattatcatcacatcacagcttagaaactccatctggggactcttaaagcttttgaatttcagagtctacaatcacatttccttaggaggcagaattttatataaaataatctataatcataaggcctcagaaactgtggttgaccatcactaaaatcttagaaattaaaaaaaaataaaggtttgaaattttatgatctggaatattccaacatgagccttaaactgttaaattggagaacagtatgccttaaaaccttcatgcctagaatctttagaacttaaaaatctacagtcttccactgatagaaccccgggctccagaaagataaagtctagaatcattgagccttagatcctggaatctcagagccatgcaacctaaaaccatgggggcactaccaagattttagaacca

SEQ ID NO: 631 - DNA, 558 bp, Rattus norvegicus
  Genbank Accession No. AI178025
aaagaaaatactttattacatcatgaaaaaggtatccaacaactagattcatacttgcttgaatctataaaaaaaaacaaacaaacaaaaaactgaaagtttattcattagactgtatgtggggtcatgttccacatgggaacagagaggcacaagggcttctaagtattgcacagtcttgaaaaaaaaaaaaaggagttgggaggagaagatcacatgatactgggaacgtctcacattatgagaaactaccaagaaacattcgaaaagaaaaccctctgtttctacagtagctttagtctgcagttcttggaatgactattccattgaagacatcttagtaacaggaagcttcgtttgagcaatcccatgtgcaaatattaataggaaaatatataaaataatgcatctcttgccatcacccccggcaattcaggaccgtattttggagaactgttttgtttgacactcggttaagctgtgagtttggcctgaagctccatctctgctgcctgcttgagcgcaacgtccaccaggagctgaaatccactaaaatcc

SEQ ID NO: 632 - DNA, 510 bp, Rattus norvegicus
  Genbank Accession No. AI178245
gttagggcggcggcgaggtgcactttataagttacaggccaggatcccgctcaggctaattatggctattggagggagagggtgctgggaccagcttttttttggggggcgggggggtcttcaaggctagtagtctagaaggagcagatgcccgatccagccgagctaaggaccaccacctttgagctccaacctgcctatggccctatagaatccaccagcagaaacagtggctacagcgagaggtcagcagtgaccggcagtgggggtccaggggggcgccggcgagcacttcggcgtcctgtgtctgcacggatgtagggctggttccgaagatctgtgatgatgtcttcaatggccccatctcggtcactctcatagatgagtgggtctttcagctgcttccgttttagctcagagatgaggtccatctgttgtcgcctggccttgggaggagacttgggtgctggaggctcttccctggctgaggtgtcccgagctgcttccttc

SEQ ID NO: 633 - DNA, 488 bp, Rattus norvegicus
  Genbank Accession No. AI178326
tgcctagggaacaataattgtatattcagtttaacagaaataaaagagtatttgtcttaaaatgcaagattttgagccatgcaattaaattgttaaaaaaaaatttcaaaactgaaaatcctttgctatttaagggctggaatgtttcagctttttaaaggaaagcagagatgtatggtacagctcccttgcaagaggggattcagattcacagttaacatgaaaatcatgtagcagacgtgtgtggagcattcttcgtacactggtttgcagcagtgacattcacacagatttcccagcgtcctggtaagcccgtgtctgcagccttaccttcccacatcgtggaaatacaagttcgcacatatacacagcatgatgatagaaaacaagatatagtaaatgagattcctaaatttcggttctaagtctcctttgcgataccagtagataagtatgcaggcagtaatactactcaaagagatgcagac

SEQ ID NO: 634 - DNA, 360 bp, Rattus norvegicus
  Genbank Accession No. AI178394
gaggggcatgtcattattttaatgatgtaaatctttggggtctccctcattagcagtaaactgtcccctctcctcccaccacaatgtttctatgatgagtgacaaacaaaaaggaaatcacattttcatactaaaaacaaaatgatcaaagccttgatttctccactaaaaactacacgtacagttcaggattccacatgcaacacctcaagtcacagaccaagaccttacattctgacctggaatctcctccctccaaccttgggctggctttggcctatgcttaggtaatactgacacccataggtgctgcacggagggtcttgtggaaggggggagcttggtggacatgctgggggc

SEQ ID NO: 635 - DNA, 552 bp, Rattus norvegicus
  Genbank Accession No. AI178527
aaagcattagtatctttattatggcataatgcagtactttatacagtaattcattttaatgtaaaaacattttatgtacaatttcagagaaacaactatatagacagctggaacataaaaacaggtaattcaaaagtccagagttacttgataaactggaaaatattttctctgtagaaaatagtaaaaatgataacatttcccactaagcccatttaagccaaataagagctgaattatacataaatattggatagattgtgtgacccaaaagaaacttctcttgctttatttgaaaagccatattttatttaaattgtgtcaattgaaattctttccttctttcccttcactgtttggttttccgcagatcattttttctatagggtaacccattaattcaaaattcaaaaggttttagttttaggctgtcctcttggaagtagagccagcatgtccttctaccatcttgaaatggcgaattcttacccaatagtgaaatgtttcattaaatcatgcccatatttattacaagccagagagtcgtcaaca

SEQ ID NO: 636 - DNA, 472 bp, Rattus norvegicus
  Genbank Accession No. AI178996
agctgatgaagctctctccgagaggccctttattaaaaccaatgacagtttcaaaccgtcttccaggcttgggacagggacatgaggcaggaggggtctttctgtatgtggacaaaagggtatggggtctctccaagcccacagctcagtcgcatgtgctcaatggtgggtgcccctgcgggcggtagatgtagtcttgatggaataagttctgaggactccgggtcccccactaaagctcagagcgttgcttcccatggttcccccgatggtaagcctactgccattggccccagtggaattcacaacagagatgttcacaggttccattccgtctccagacaacctgctctcctcgccctccagcagcttcctgtaggtggcgatctcgatgtccagccccagcttgacgttcatgagctcctggtattcgcgcagcagccgggccaggtcctgcttggccttctgcaga

SEQ ID NO: 637 - DNA, 513 bp, Rattus norvegicus
  Genbank Accession No. AI179150
attaatttcattttaacattttgtcttcaacaattccagagattggtatgagaatgaggataattgaaaagtagctgatggaggctagttggccaataatgataaatgggtgttctactggttggcctccgattcatgttaagactaggaggttggctactaggattcagtaaaggatttgggtgattgggcggaatgttaagctgcgttgttttgaagtatgcaggaatggtaggaaggctaagattaggattgataagattagggctacgactcctcctagtttgttgggaatggagcgtagaatagcgtaggcaaagagaaaatatcattctggtttgatgtggggtggggtgttgagggggttagcgggtgtataattgtctgggtctcctagtaagtctgggaagaatagtactagggttattatgaataatagtaatataaatacacctaggaagtctttaattgtataatatggatggaatgggattttgtctgcgttggagttta

SEQ ID NO: 638 - DNA, 261 bp, Rattus norvegicus
  Genbank Accession No. AI179167
tcggtgctcgtgtaaggtttttcttttcccctcaaattttatttcaataaaaggagacttgggcgaggtggattccccatagccggattctccccctccccccgagggtggctaatgctatctggggatgtcttcacagggaagagagaactatgggtgggctcctgcctgaggtctccaccctcagcccagcggacatatcacaggcagcttaaaaaaaaatcctaaaaaaaccaaaacacacatttaaatcctcgtgcc

SEQ ID NO: 639 - DNA, 631 bp, Rattus norvegicus
  Genbank Accession No. AI179378
tgtgtcatttattaataaagcaaattctgctggtgtgctggacttcggaggcaggaagaagtgctgaagggtgatattcttcatttcatttcacatccagccagttgtgttaaaaacatttcctccttcctccttttactcctcaccctgaccccagccccagccagctccggtgggggctcagtcctccggagtccaggagattaaggctgctgtcttccctgtcagaaagacaggcaaagccctggaggcaggaagaggacgaagtgaagggctcatcaggcagggtgggtcggccctgaagccagccttctgcagcagtcagctaggcagctgctgtgtgctaaatacaggttgaagtgaggcttctgggagctccataggagcctaaccaataaactgcagataatagagaaaggtggctagagtcctggtccattccacaggctgtaaacttcttggccctagattaaattataatcccaaggagcaaatgcagaagagtgggctcaaagatcaagtctgcgtgctgacctcctgaacaggcacatgtccttgggcgtgctgtggtcgtggaagcatggtcaactttgaggattaagtagcttaatgcctcgtgccgaattcttgg

SEQ ID NO: 640 - DNA, 541 bp, Rattus norvegicus
  Genbank Accession No. AI179403
ctggaaggagcactctatatattttatttccaccagttacagtgttcacattttccaagatcagtgtatgatctttgaaaagtcattgatctctgcaatataatttcatatcatatattactatgatttataagaaatctgtgaagctatttttatatgtgatcaaaccaaagtatgaattttgctaataagatcaactttgtatcacgtcatagaattatatattttaagttgcttaaacttttaacccgtcacatcacaatgtaattttctttagaaaaaaagagtagctggtattcatgtaaacagtacatcatgagatgcaaagtttgataatccataactatcactccaatgtacacgacttaaaaatgatactagagcttacttatcttacatgtaaagaaacccacaaatctgttacaaaaggcagcagtccaggctaatgtagctggaatcaacactgtggctgctgtcaatttcctagttgtttttaggtttgaagttgattttgccaaggcagacagcaaatcctcgtgcc

SEQ ID NO: 641 - DNA, 357 bp, Rattus norvegicus
  Genbank Accession No. AI179407
cagattgtcaagacatttaatatttggagagaaggtgagacagcccggtgttgatctcaggacaggggtttcagagtcctcgaatcacgagagagaaacctggctctgcccagccacagatggaaaggaccatccatcccagccacccttccagactctgtctccagcgccacctcactgagacttagtaccttgggctcattttttccttggctcatctctacatttttccttgcattgatgtcccttctcttcccctgacagttcccagaacgaaagtggtgtcattacggaccagctgacccgggatgaagcatctgtcgtcctattccatggatcaaagaattgcctcgtgcc

SEQ ID NO: 642 - DNA, 668 bp, Rattus norvegicus
  Genbank Accession No. AI179422
ggttattgaatatgtattttttaactgaaaaaatcattcataaattaacatacagaaatgtacaaacacatgagtgaacaatgtaatgacaaggaccatttctgtgaaaagtgtttttaaaacatctttaggcttcagtgcaaaaatgtccccctggcacctttaaaacaaagagcaagctcagaacaaagacagtaatggtggctaagccagtggcgtcagtgcctcgtcgatggtatgcacagtcagtgtgtgctctgccgctctgaggaaggaactcgatgacaggagtccccattttagcaaaattaaagttttgcaaatcccccctccccaaagaaagcctgtgcggacagagaccttgcacacacagggcagtcagtcaagggcaggtcggcttaagggtcactcgtctgtagcatggagtaatttcagctgccaaagtacaccaaggtcacacttgattctcaatgtcattttctttaagcaatgacctaatgtgtggtccagtggtgtggctctgactgtgacatttcccactcggtatgtgactgggcggacaatgactgacagtgcccacaagagtccacactaataacaaacttggacatgattgcaagggaacataagtgacccgacttgagcagtaaaaagactttctttgtccc

SEQ ID NO: 643 - DNA, 570 bp, Rattus norvegicus
  Genbank Accession No. AI179599
ctctttataataattttatttctactttttatatttacttatttactttgtatgcttgtacgtcacatgcatggtgtgatgtggggtgggtgcttacctagagagaacaaggctctgagtctaatccccggcatcaccaaacacagtgcacaagtgctaatttttattccttcccagaaactcatctgacagtggaagaatgaggtgatcattgtcacacaggaaacactgactagagtacacgggctgtcagcaagtcacagacaacatcggggaacaacaaatgcatctgggttccaggcagccattcccaagtcacagtggtgttcctttctaggcagttggcaagagacaggtcaaatactttcaacagaatttttaggccaggtgagcagccaacaggaggagatggaacggctgagagacctggagaggaaggcgagctagcagcatgtccagcctggggagggtttggtctggagattgatgtagttcccttgggtggacgaagacattatatcttctctggaattgttcatcatcttttccacgaggactctcatggcctca

SEQ ID NO: 644 - DNA, 590 bp, Rattus norvegicus
  Genbank Accession No. AI179605
ctgtagaaactcattttattcttattcagactatttccaaaagaagcagtggtgcgctgtttttctaaaaatatgcctttatagatttatgtgtgtattataaaatccatacgtgtatttacacaattgctacatacaaaattacagcactgtggtatgtacatgtctgtaagtacattctgtcgctcagccctgctgtgcttgtccctgtcgagggaggaggctcagtgagtggagagcagtgcaggccggccccacagagccttgagctggggcctcggctgagatggggtggctgctgcggaaggagcagaagcagcaggctgaaggcctttgtcccttagagacctggtgggcagtatctggaggctcccagcagccttgccccatctaccctgtggcacccacgctgccttcagtgtgagggtggtaaaaccaggcccctccaaggccactcttgtggcctgaacttgcttggcttggccaagaagttgcatttgaggtgggagggagctgtggaagacaagtgccctcctagtcctatcccgtgatgggggaaaagtctggaatggtaaagcctacagggccaa

SEQ ID NO: 645 - DNA, 284 bp, Rattus norvegicus
  Genbank Accession No. AI179971
gcttcctactcaggctttattcaaagacccaaaggtttaggtgcaagggagggaaaaagggcccggtcaaaaggcaagcccggcaggaggcggtttaacgggacttggagggcaacacagtgctcacagaggcaaggaatttgtccaaaaaggcgtgcctggcgggtgtgaaatctccagggggggggcaaacccagggcaccaacaggcattggctcaggaacttgaaatttaccggatccccaccccgcttgggggcatgcaagacgatcaaaagggaccgg

SEQ ID NO: 646 - DNA, 597 bp, Rattus norvegicus
  Genbank Accession No. AI179979
aaatgatcaaagagatcctttatttaatgtagacagcctagtaagtcatcaaaataatttataatagttagatgcctcttaaatatacatgttatcttctgaagctaaaagtaatatgcactcaaccagtttttaaaatctatttggaacattaaacatgataaaagtagaaaaaaaatctcttatgaagtcctctacgaaaggaaattgtgacaagttcctgttaagacagaaaccattccatctccaagggagaacaagagaaacatgaatatgaacagaaacacctacttcctgggtttatcctaggtagaccaactctttacagttattttctgtcttccctggataaataagaatcccttaacagcagcccggaaattaaccaattccagtgaagaccctgagatggctgccctgcagcaggttcttgccttttgcagtcaacaacatcttttacaaagcaccttgacttatggcaggcgtgacaaaaccaggtgaattagttgtccccagccagggcccggccacctttagccttctaggcgccactgttgggaaaaggagccatcacagatcgccatgccgacgtagccc

SEQ ID NO: 647 - DNA, 545 bp, Rattus norvegicus
  Genbank Accession No. AI180170
ggttccacttaaattgcatgttttatttctcccaaccccagccatagcatagaagccccatatatccatcccagactggtttctagtaggctgaggttatagggagcctcagtagagcaccgtctcccaagagccgggcacaagcgttgcccccacactgatgaagccaacagtgcactggccccgtgtttccgcactcagtctgagtttacaacacaacctcacccttgaaacggacagtctgggagtgggggtgtgagggagtgaaactgaaattgcctattagctcacccttttcaacattaaacagagaccaagagagaaacggttccaacatttcaccacatatatttcttcttgtgcagtctaagccgagaacgccatgtaaatgggtcactgcggaggcagcgaacgcagcaatttagttactctccgatcagagggagaaaccaaccagtatgatctcacgtctactgacttctgaaggtttacagcagttaaagtattttgcttctatgtatgaaggttaaaaaaaacattttttt

SEQ ID NO: 648 - DNA, 480 bp, Rattus norvegicus
  Genbank Accession No. AI227761
gcggtaacagctttaatctgtggtggctgacacatgggacaggatcctgttggcctcccatccttccatgccccagaggaagagctacttctcagggagctgaagcagatgccatgagcaagttggtaattggtgtgtttcccagtgtctcctggagacctgtgtttaaagtgagcactgcagggcggacagcagagacaggctgcaagtccttacacacagggcttggagctgggcacagaaaggcagggctccagtattgatatattatacatatatatatatatatatttcatatgtatacacagatagttttctctctggaaagtattaaaaaaattgatcaaccttcaatctataaaaaatacctactctacatgatagaaaaatctctcctccaagtttacactgatttacacacaaggctttccccaaaatgtacaatacgaggcaacgtcttaaaccgtagtgtagaaggga

SEQ ID NO: 649 - DNA, 633 bp, Rattus norvegicus
  Genbank Accession No. AI227919
caacaattttctataatagctaggagaatacagcactaatgacagacacactaagcacagtagacagctataaatttagagcataaaatgtcattctgatattgttttggctttccttttagcattaggtaatacccagtgaaaaactcgtgtttccaaggcttttgttgatatgaggtgaattcttgacattcgagaagatttcctgtgcgatactctggagtgggttcagtttagatccagcgaggcttggtaacgcctctcacctgtcagcatgcatttctgcttccccgactaaccactttgcagagatcaactgtgcagatcaaggaaattctttctccagatccaaggaagaaaaagattagaaaactgcaaccatttactgtattccaaaggcaggtccatttcatggtaagtgatgaacagttgaaataaaaccacaatgggttaaacgccatgagctcatctgtacaatactgctggaacaattgagactttcccaaacacaagaaaatcatttacttcagaatccacaaaagaacacaattctggatcataaatcacaacacagatctacacttaaaggagaaatcaccttttgtgggaaaaaaataatggctcacatgactt

SEQ ID NO: 650 - DNA, 553 bp, Rattus norvegicus
  Genbank Accession No. AI227938
caacaaaagcaagtttggtttatttgaatggtttcattaaataagttctacaaaggtaacaaactgaagcacgaagcgcaatcttacaagaagcgcaacacccggagttagtgcaaaatgtacagttaacggctgctgagaaaccccaaggtttgaattcagttttaaacagtgtacattgttaaataacgtaaggaaaacatttataattcggaaagttctttttaaatgtggaaaaagatactcaaagtgtactattaacacaaaaataatttaaacagttcagtagctctagctcttgtctctaggcttcagttatttcatccacaggaggggaaatcaacagtaagtaaacctttgtgaagggggcacagacctcaaaaccaaacaccacaggctgcatttggctccctctactgctggtacaaaacactcaatcatccaaaacccgcttcactcccacagtacctctcaccctctcccaaaaggaataaatgagtgaacactttagtagcaggacctcaaacaaaaaccctgctcattacacttccct

SEQ ID NO: 651 - DNA, 429 bp, Rattus norvegicus
  Genbank Accession No. AI228068
aatgctctgaaaacactttattacacaaattacattcagattctgaaaaatagtgttctaacagtgtaaccatctaaaaataagacatcccggaaacacaccaactgaggagaaatttaaaaaaagaatttaaatagagactttttaaaatttctctcattgcaatataatgttagtgattttaaaaaaatagaaggagatttagcagcttttcgtcgtgtggcaggttggttctcttcactgccacaggctgagaatgctgaacaggaaaggcaccaaagaaagacactggcgatgggtgtggactgggagaatactgtgttcaagcagagaatagggctatttacatccaccaactaaaacgtctccaaatgtgaatgagctaaacttccctcgggggttggagcgctaccttggaagaggagggcg

SEQ ID NO: 652 - DNA, 588 bp, Rattus norvegicus
  Genbank Accession No. AI228236
caattactttaataaggtgttctgaggaaccaggaaattaacagagaggggcgaataagtaatgcttcttaagccctgctcagtatttcgtcagtcatcttctggtaactggatcttgctgggatcaaaatagttggattccatgatggggaggccgttgagttctcggtatttcacaagtctctcagcttcccggcgggcccactcttgcatcctgtaatcaggcaggtaagccacaaaggtggtaccaaaaaccaggacgatggaaaaaccaaagaagaagacagctcgcatattccagacgtccaccacagggtcactgtcataaccgtgaaagtctgggttcttcgcgtagaggttttcgtcctcgggttctgggtcctcctgccataccatggtcggttctctttgccgctttctctccacaccggacggggcgattacagccctggaagattcccagcgaacacgggcagccgggacctctcgtatcgccgccgctactgacaggcggcgagcatacaagcttaacagccgggccgccatgaccgcttgtactgaggagtccagggggtgggggcggggtgg

SEQ ID NO: 653 - DNA, 475 bp, Rattus norvegicus
  Genbank Accession No. AI228313
gtcaaataatttgtcatgttttaatgggatgattaaaataaaggctcaaataagttttcaatatattaatttctttaaagtcatcttcaagcaaggtgctgtttaagaaaaaaacttagctttgtccacagatattaaatctcaaaagctacccaaagtaattttgacattggatgcagctttaaacaaaaaaaagaaagaaagaaagaaaacacctaggtcttctcaaagcaaattatacaattagagcccccaaatttgtaaactaaacattctgacacaaatgcaaacttaagttggcaacattaaagaaaggtcacaagtgcatgtgtagatgtagtgcttgccactgagtagagaaagtgacgtccatttggccatcagagaaggggactgcctagaaacctcccaaaccagttagggttaacaagaccctcccatcatcctacagcacacaggaaaaccagaaaagaac

SEQ ID NO: 654 - DNA, 512 bp, Rattus norvegicus
  Genbank Accession No. AI228326
ggaggagaagtcagcttttatttacagaagatttgtcaaatgtcctttccagtttcctacgaggcccaactctgcgactcaggatcaaggacggggagtgactctgcctgcttcttatagcgaatgtgtttctaaggtgacttctgtgcagccaaagcttggagatgcacagacgtcctgcactctctgcccgtttgtacgttcatgatgaagtcagttgccgacatgttgggttttgcagtgatcttcaagagtgatgattccactttatgatgcagaaataaatcaaaacaaatgtggatctacaaagaagagacatcttcagtgtgcccgtccactgcctcagaggcagcagcccagagggcaaagtgcattgacgaggaggaaaaagatcctgtcacgtctcatagtgacgtggtgatgtctcgctgtctcgcagctttacccggtcacatttttattattagttgtgaaggtgacagttactttctgcttctgtccccttcaatcca

SEQ ID NO: 655 - DNA, 432 bp, Rattus norvegicus
  Genbank Accession No. AI228335
atcagttctgctgtttatagatttcacgggaaggccgaatacattttaagggaatgaggaaaccgttcagtgtctagtaacatgaaacagtatcacattattccataggaaacgtgtatatttatgtagaacaggtcagtcctgagaaacggcgtcagctcagttcgtgtcccatccatcctcctctgagatcgctcttgctgcgtccataccagacatcccaggttggttagcagggcatacatctgaagctctcaccagacctccgcacctcatctacggctacatacagcagcctaaagaagcacggctttcaggtgtggtgtaaagactctgaggtaatagggaacgagttaatttgttcttggctgtagttggctcccaaagagtgcctgtgtttttcaaatgatgtcaactagaaaaagacaatgt

SEQ ID NO: 656 - DNA, 450 bp, Rattus norvegicus
  Genbank Accession No. AI228438
aaaattaataaaaatattttattgaatttcaggaacttggtactttttaaaaattccaaatctttgcacacagatcagcactctgcttactctggaactgcagatgcttggacttcacgattgtcacttctctccttgtatcacacagcatagaaaacccaagtcctgatgctccccaaccccttctgaactactacagctactctgaccagcccctcagcagaggacagggaagtggggtggggtgtgtatggagaccagctgctgtctgaatacattctgcagtgtgggggaatagctataccaagttatgccacacacattctggaatgcaccgtacccaggacacaggtgagtttccctttgagtactgtgtggttcaagccaacactgctgaggttatctagtccctgagggagctcagaagtttggtaaaggtcaaagagagac

SEQ ID NO: 657 - DNA, 314 bp, Rattus norvegicus
  Genbank Accession No. AI228455
aaacaacttcaaacagggctttaattccaaataaaccacagacccaggtgcccaggagaaagcagaaccaagctgatgcgctgaccagggctggcagtgtcgagtggagaatgctgggcgctcccgacccactgctcttcctgactaggccttctggtgagcgccttcatgtggacaggcccttgtgtgtttgggcttaggcagtctgactccaagcagtaaggcctccaggcaccacagtccttggtccatgagcagagcaggccctcgggacagaggtggccttgagacctgaagagcttctgtcctttccg

SEQ ID NO: 658 - DNA, 592 bp, Rattus norvegicus
  Genbank Accession No. AI228624
agggacccaaaatacagagataatttattggtcacgcatattgtcccttgcatgtttatctgtatagcatgtgtgctgatcccagcagagacatgaaagagggcattgtttttaattggcaccatgtgggggcaccaagacatgaaccttctgtcctctagaagaacagctaacggaaatctttatagctgatccatcttgacaggtcctaaagataaaccttatttaatctgcaaagtgaaaaagttttgcaaggtcatgcccagagctaaaattttgacgctttcctttgcaaagctgaatggtgaaggtgtcaagaagaccagttctcagagagaagactttaatgaatatattttacaaacacactggagaatcaggcaatgcttcctgcattggatgcaatcctgggccacaagtctgcacactcctttgcaactggacctgtgatagcagaacctttcatctcgcctttattgtttactatgacccctgcattatcttcaaaataaaggaacaccccgtcttttcttcgatatgactttcgtagtcgaatcaccactgcaggatgtacctttttccttagttatgg

SEQ ID NO: 659 - DNA, 455 bp, Rattus norvegicus
  Genbank Accession No. AI228654
tttttatctttttaatatacattacaaatattttaaacaatgacattttgttttgtttaacgtatttacaaaacaaaaatatattacaataaatatgaatgagacagtgaatctgaccaacaacaaactgtcacgacctggtatttaaaaggaatgcagaacttattggtctgcatgtgttaagagttttgagatagacaggcatccagaatcataatgcatctggggaagagcggtggggaaactcccagatttaaggaggggttctttctcattgctaatcgcataacgtttaatggtatttaaatcatgaacattaatgacctatgcgaacatgatataaagctaatatagttctaccacctcaaaatgtatgtggcagccacataatatcctcttaattattgtcattatatactgtagttcacacaatatctacaaatgtggaatgaggc

SEQ ID NO: 660 - DNA, 379 bp, Rattus norvegicus
  Genbank Accession No. AI229142
gccatccaaggggctttctccattttatttctttgggaaaggaaaaatgaaaagtctttccatcacatatggtagatatatatatatatatttatatatttatatataatttattttgtggttggacattccaaagctgttcatatttttctctcccccccatctcttttgttttgtattaatgccttttcccagcccctgtggaccaggcttagggtctggatcaggtatagtgagggattagagggatgggcagtggttgccagagtagcctccaatcaaggtcataaaacctgttgaggaccacccagaaggagctgtgcagagagttggaggctacaaataggacactcctatttttgtgggggtgcctcgtgcc

SEQ ID NO: 661 - DNA, 319 bp, Rattus norvegicus
  Genbank Accession No. AI229172
gagaagccacagccttttattttggtgaaaaaatggagtatcagggcttctattcaataaaatatggaaggttgaggaatgcttgcttgcaaaagctttgcacaaagaagtgctggtagatacttttattttggtgggaaaacgaatgctgtctctttctctctcctatctctcccccctcaggcaactgtgccctctaccatcgggggggctggtggtaccatgcctgcgcccactccaaccttaatggtgtatggtatcacggaggtcattaccggagccgataccaggacggggtctactgggccgacctcgtgcc

SEQ ID NO: 662 - DNA, 219 bp, Rattus norvegicus
  Genbank Accession No. AI229332
agcaaaaagcaaacaacttttggcttttattagaaaatacaggcagaatggtaagctggggtaaaagagaatggaaagatacggagactagacatttgtctgtgtacaatgagaaactgttttggtgtgtgtgtgtttaattgagcacagtattaaatattgattacctactaatggtgatcccacccactcccaacaaaacactttacaaacatcggt

SEQ ID NO: 663 - DNA, 555 bp, Rattus norvegicus
  Genbank Accession No. AI229502
caaaatatattaaaaaaacaaaacaaacaccaaatagactaagaggttatcttacaccacctgcttctcaagtctttatggagctgcacttctaagtcaatgggtgagttcctctctgtgctgtcagccaaaggagccagcctctgctgtcaaactcggagtcccagcagctgatgacatgggagtcggatctagtattgctagaggagcttgcttacaatggcagctggcatgtccgttagacctctttttcagaaccatttgtctcacatacttggggactgctgtgcagggacacccggtgtggcctgacgaggcaacgtgtacatggctcccaaaaactggtcggcaatccttcctgcttctcgaagcccactcagcagagcaccatggaccgtagctgggtagttgcggattgtatgttctccagcaaagaagagtcttggactgcggatgttttccactcaggaagaggcggcacaaactgaacagctggtggctgctgcttcagcactcccaaaggaagggttcagagcactgcgttacactttataa

SEQ ID NO: 664 - DNA, 550 bp, Rattus norvegicus
  Genbank Accession No. AI229680
gaatgtccactggagtttatttacagacaaccttaggtaaggcattttcctctaggatctacatcttgcgaagttacttggcttcaggcttcttgtctccagcttcaagcttgagatgctcagggggctgacgataggcagggaaagcctcccaggggctgttcaggtcaaacttgcggaactcttgtgccaactccactggctcagccactacccgcttcacctcatcgtcataacgtagctcaacatagccagtgaggggaaagtctttccggaaaggatgtccctcgaagccataatctgtcaggatccttctcaagtcagggtggttgaagaagaaaactccaaacatgtcccagacctccctctcataccaattggccgcgatgtgcacagacactatggagtcaatggctgtcagctcatctgcataggtcttcacacgaatcctagagttaaaccgcagggacagcaagttgtagacaatctcaaaacggttctgccgagttgggacatccactgctgtcaagtcagccaaagatttgaactg

SEQ ID NO: 665 - DNA, 534 bp, Rattus norvegicus
  Genbank Accession No. AI229728
aatgctctgaaaacactttattacacaaattacattcagattctgaaaaatagtgttctaacagtgtaaccatctaaaaataagacatcccggaaacacaccaactgaggagaaatttaaaaaaagaatttaaatagagactttttaaaatttctctcattgcaatataatgttagtgattttaaaaaaatagaaggagatttagcagcttttcgtcgtgtggcaggttggttctcttcactgccacaggctgagaatgctgaacaggaaaggcaccaaagaaagacactggcgatgggtgtggactgggagaatactgtgttcaagcagagaatagggctatttacatccaccaactaaaacgtctccaaatgtgaatgagctaaacttccctcgggggttggagcgctaccttggaagaggagggcggcttctctacgctaagttcatataaagacaatggcactggagtgaactggtggggaactcctcacctagagaacagaagccaacggagccaaatgaagtaaataa

SEQ ID NO: 666 - DNA, 305 bp, Rattus norvegicus
  Genbank Accession No. AI229879
ccaggggttcttaacattctacttttaataaagtttctcatgttggggggaaccccaaccataaaattattttgctgatactccataactaattttgctgttatgtcatagggtaaatatcggatttgcaggatatcggataggaaacctcaaaggggttgggacccacaagttgaaaaccattgcattagtctaaccttacattttttgatgagcacacatagccacctcagccttgcactcatgtctctgaaaagttgtgtaaccaaggcacattccttagtctgagggcttgagtgaggaac

SEQ ID NO: 667 - DNA, 459 bp, Rattus norvegicus
  Genbank Accession No. AI229966
gcctggagatcgtcttcgtgtcctcggaccaagaccagcggcagtggcaggacttcgtgcgggacatgccatggctggcgctgccctacaaggagaagcaccggaagcttaaactttggaacaaataccgagtctccaacattccatcgctaatattcctagatgccactactgggaaggtcgtgtgcaggaacgggctcctggtgatccgagatgacccagaaggtctggaattcccttggggacctaaacccttccgggaagttatcgctgggcccttgcttagaaacaacgggcagtctctggaaagcagcagccttgaggggtctcacgtgggagtctatttctctgcacactggtgtccaccctgccgaagccttaccagagtgctggtggaatcctaccggaagatcaaggaagcaggccagaagtttgagatcatctttgttagtgcagaca

SEQ ID NO: 668 - DNA, 450 bp, Rattus norvegicus
  Genbank Accession No. AI229979
  misc_feature (1)..(450): n = a or c or g or t
caggactcagtggaatgagatctcctggagccctcagcaaagctgaggagagcaaaggagatgacaggtgagtcctcaacaaaatacatatggttggcacataaatgggaggaaccctgggcctgctctggaggagatggatcaagaatcctaaggcactgtgcttctgtggatgccttgatgaagccaaagagctggcactgtcaagctctggtttccatggccactgccttcggtggagtttagttctctcccagcccctcctccttggggcagggaattttagtatctggtgcctttatcacaaggtcctggggtctggaggtagaaagtgagatgcaggagaagaaatggggcanggtgataagaactccacttcctgcaagtaggaaggccccagccaaccagatgccacacgccccacaaggtcagaaatagcagcctcgtgcc

SEQ ID NO: 669 - DNA, 478 bp, Rattus norvegicus
  Genbank Accession No. AI230002
ttaatacacatccatgaaaagacaaggaaattcaaaagtgagctagtacaggtcttccaaactgaggtacaaatgcctccgttcctccagcaattcccactggtattcccatgatgcaaccgtctgtggcaacagtctaccgtaggaaggggtggaggcagggcaggaacgcagagaaatgtgtccaattcagagcaattttcaactttgccctaactcaagtaccctcatgggactgtcttgcaacacatgttctattgagaaaagaggtttcaaaccaaagggtgggtgactgcaataaatatgacatgagatgaacaaggcttgggagtttccatttatttattctaacatttgcccttctcactagacactcaactccatgagggtagagaatgtccatactgttccactcgcccctggcacctagtagtgactcaataaatatatgttagaaggatggattatccatgattta

SEQ ID NO: 670 - DNA, 544 bp, Rattus norvegicus
  Genbank Accession No. AI230056
atattgcaattgacgaatccttgaaaagcagcctttcaaggttgcctttaaagggctctacacaaacggttacaccggatcgctggcagagacctttcagaaactgtagtcactgagttcattatgagtcaaggtgcttgtgggttggttgaggaagaaaagatcaacacatcatacataaattcacaaagtgctgaagttacacacgggaaactaactttgaagtaattctggtggtaaaagtatcaacaatgaagattcaagggagaccaaaccatcccatgaaaggattagtttaaatcagagagcaaggagagcacgtcatccccaaaagccgagaccatgactccaggtctagtgcacaccaggaacatctgaccaaggaggtccctttccttgtccatcatttcagttctatccccttttcaagggcatcgaatgctctgaaagtttcctgtgtcttggcttatacacatatctacctccctcccagaaagaaagctcaagaaagcaggagtgtgcagtctttcttgttcctggctga

SEQ ID NO: 671 - DNA, 466 bp, Rattus norvegicus
  Genbank Accession No. AI230165
gtatttaaaattcagtgttattcacattttcttgcaacaacatcataatctcgttagcaaacaattaatgagagtgttctgtacagcacagaaggtcaggtggatgccagggcagggctccaatgggaggcagcacagggaggcagagtgtccctttgctgtagcacccattttaattttgatcccatttttaatttatttattatgcgtcagagataggagacatggctatgtgatcatcgaggacaatctttggtgtccgttctccccgtccaccctgtagttactgagagcggaacaggatgtcaggtctggtaacaagcacccttccctccaggccccgcctgccctggaatctcaggtctcaggcaatttaactccattttcccttcagaattttctgcagtacaggttagtagaaacatttttttctgagtttttcagagaaaatcttcacaaaattaat

SEQ ID NO: 672 - DNA, 466 bp, Rattus norvegicus
  Genbank Accession No. AI230247
cccagctttttaagttgcatttatttttgataatctgtactgtagccaatcaattctattctccattcttgcttaattgtattagccataaaggagttcaggttcataggactcagtttctctattaaaccgtcattgattatggaaatactgtcttaagcactatgcagattaacaccatacttttcttccattacatctttcaagacagtcactcacaactcagaagactgatacagcattagatgaaaaaaacaagattcacagatatatgtagtgaaactcaaactaggagtcttagagataaaaaagataagtagatatttaaaatgtagtctgttaaagatttaatcggtttaaagtataagattagaaagacaaagtttctattgttttgaaagttttaagtaaagaaaaaaaaaactggaaaaaatgtctttgttgttctttctccgttcttaattac

SEQ ID NO: 673 - DNA, 323 bp, Rattus norvegicus
  Genbank Accession No. AI230262
gtgcgacgccatcctgtgcacacagggggcttcaccaggcttctgtgtagcgaacatcaacctcctttagattaggaagcttggccttcagatcctcataggtgtcagccgagagcttggtgctgttcatatttaaactgcaaagactcttcatggagctgagggccagcaagcccgcgtcggtgactggggtctcacacaggttcagcacctggagcatagtgaggtgttccgacaggagccgcaggccggcgtctccaaactgcgtggaccacaggttgagctgcttgagagaaggcagtttgatgaggtgctcggcgcag

SEQ ID NO: 674 - DNA, 418 bp, Rattus norvegicus
  Genbank Accession No. AI230284
atgcaaaaatttatttgaccaaaatgtagaaaaagtgataccattacgtatgatacaatcgcaagaatctaaagaacagagtagattttatcagttgcacagtttgctaaaagttcatctccctggtagtgtgatgcttaataaataggagtgaagggagtgtgtacatggaacagtattaaagctcgatcggaaggcacatgggcagcagtgatcaccccagcattctcacctgggaagctgaagtaaataaatctgttctccacggcggagtgtggaacagactcagtaagatcgggccaatctacttgtgctttatgacttcccatagacgggttttaatttttgctctgggtggaaaatttctacatttttcttgcaacaacccctagccgctccaacatcagaaccttgtgcc

SEQ ID NO: 675 - DNA, 616 bp, Rattus norvegicus
  Genbank Accession No. AI230549
caaaaagtcctagtttgatacactttactaaacaaaattaaaggttaactgtacaagcaattaaaacatgatatgtagcaagtgttatcaggagttttctattggcaaactgtttaaaaatagtcacaaactgagcagttagaagtaccttcgaagtaagcactgctcccaagtgacaggaagcctctcccgaaagctcccctaagagtgccagctgcccagcaccctcaagtttgggactgaaagtcaatggcaattgagatgggaggtgcagacctctgtagggtcagtttccagtttgccaacaggagtatgagggacgccctcaaagtagaggaacgtggaactgtatagcctcgaaggagggcacattaggctcacatgagccccagtcagtctataaagaccttgtttggactagagatgcagtcagtgcttggctggcatggagtcttgttggagaacttcatgcatgcccacaggtttatgtcaaacaagaaaaagttaagggctgggttgtgaacacacagagaattccacgatggcattcacaacaaggtgcccaagtccccttgtcacaacactttctgtatgacttaaggaatgtctttatgta

SEQ ID NO: 676 - DNA, 410 bp, Rattus norvegicus
  Genbank Accession No. AI230554
tttggggggttagttttttttttcttccacctttacgagagctctggggatcaagcttagatcattaggtttacatgacaagtgtctttacccactgagctagcccatgattacaaaaagtattttctatatactgaatcgataataattaggcatatcatatgctagtaataacaactaaagattattagtacagacatactcactgagaaatctaaatccaaaaactcacagccaagttttcaaacaaaatgtacctcaaactatgaccaatgtttagctagggcttgccaggctgggcccatacaaatgttttctgagaagcctaggctttgtgtggccagtagcaataccattgggagctgttagcatttggactataatccctacttataattctatacaccttt

SEQ ID NO: 677 - DNA, 585 bp, Rattus norvegicus
  Genbank Accession No. AI230716
atgcaaaaatttatttgaccaaaatgtagaaaaagtgataccattacgtatgatacaatcgcaagaatctaaagaacagagtagattttatcaattgcacagtttgctaaaagttcatctccctggtagtgtgatgcttaataaataggagtgaggggcagggttcagataagctataagcaggtgactctccgtcagcactgtaaactcgaggtggccccacactgctggggaatgtggaatgtttcagggagatgttaactgaaaaagcaaaactacaatgccaaaaaatatgtgcagcctctagagcgctccacgtccagttcagtcaggagttctcggactgtattagtgtcattcccaaaggaattcaagtctcagcaaactcaagctcccatttcttgatccctgaacaatggatatgaagttaagccaattgctttctctatcactactttgcggctggagagaccctttgttgcctaacccttggcatcaatgttctgatggctggcaacctgcatattatttgagacagagtctcgctgtgtatcgctggtacctggctttgctagcagtcttgat

SEQ ID NO: 678 - DNA, 729 bp, Rattus norvegicus
  Genbank Accession No. AI230724
agttagaaacattttatttaaatgtgtcaaataaaaacctacatttccagaccataagatgttaatacattcaacaaaaacaatatttactgctgtgaattttacagagtaataatccagatccattttgattagatggttgatgaaccttcctaggttacactttacagacataacaaatcccttataataatgtaaacaaaataacttttccctaacgggtgaacttgagaacttcagtccattctttctggacttgcacttctgtgtggacttcctgatggggaacgacttcttttaggagatggagatctggattttgatcggctgcttcttggtcgtgaaatagacctggatcttgatctcgaccttgagcgggatcttaataaaaaggaaaggggacacaattacaagaatgcctttataactaagcaccttcccagagagtagataggataggaaagagtagaaacaattactgcacaagtcttgcctctcacatggatccaatctaagaaccactatttcagatgcctacctccaccatacacagtatggtcactacgcctacaaagacacaacagtcccactttctaacactaatcaccacaatcaccaagtggttccatccaactgctgagctgactttattcttgttatcataagtgctccgtttgtcaaaccaaattaggctgaccatatcttttgaaaatcttgggaccctttaat

SEQ ID NO: 679 - DNA, 608 bp, Rattus norvegicus
  Genbank Accession No. AI230728
gaaaaaccaaacctaaaaactcactttaatcacaacccaacagcgccaggtgcaatgtctgggaagaccctgggtacaatgctgtgtggcagacacacactcactcacggctctgagaaggcccccaagggggacttaccttcagggactgagccaagagagggggaaggggcagccccagaatggggactggggcactccgtagggaaaggtgctacttcttggcaaaagagatcttcattgcattgttctgtgtgatcttgaagccttgcagggcatctcgtgctgccccagcctgcacttcattgtcaaactccacgaaggcaatgtcatggcgcccagggaccagacgcacctccttgaagccagggaactggttgaagagcatggagagcatgagctcgttggtctcctcaggcaggttggtgaggaacaggatgtgattgggtggattctccgagagaggttgggcaggtggcatctgcccaggcatgagctgctgtgggggcattgccccaggagggatctggccaggagcaaggcctggtggcgggatcatgccatgtggtggcatgtagggaggctgtcctggcatgtggtgcatgatg

SEQ ID NO: 680 - DNA, 480 bp, Rattus norvegicus
  Genbank Accession No. AI230880
gaggctggagcaaaccactttattcagcactgaaaacccagcccacctgggagtcaagctggagccggtcaccacatccaaggctggggccttctgaggacagaacactgttccccaaacctaaatccatctatgtgtttggccctggcctgtgtctgtccactctgctgggttttgtctcttggactagttatctacacacaagatgctgcaggcaaccacgctaccggtacgtcacaagttctgcgagattcacctactggagaaaatgaggtgagcaaaagccaaaaatacagcgaagtgaagcacccggtggcctggagatgccaccctgctgctcttctgcagggaagaaggtcctgtccatgagaggtggggagaagtagggagcactctggggacgccagtgacacccaaggggcacaagctgggaggaaaagaggctggggaagcaaggcataatatggctcccaggacctg

SEQ ID NO: 681 - DNA, 618 bp, Rattus norvegicus
  Genbank Accession No. AI231011
atagactaggaaatataatttatttcataaaaattaattttgttacaagaggaatgctaaaggttatttacaagttgtttacagaatgaacgggtggggctgggactatccccagtggatcagaacccacagacacacagccatgttcacagcctgacatccaagctcccacacacccgacctctgagggcgggaggaaggtgctgactcagatgcctgggagaacacatgaacttgtaaagaagataaagaaagacatccatgttttgatattggaactaaaatggtaagggctttggccagagtaaagaactgctcagtcgtatagaaaaggcattcagctgtcacatgtgtttatatgaaaagtaaaagaagcccgcagtatccagggttggtactgtacactgtggtttgggtgtcactggaggtcttaaggcgcgtatcttgggacagaacaatggagagtggacagcagaattaagtacacatctggcagaagccacctgagaccattcaccggtcctctctggtaatgctgcaacgctgttgtttctcacggctatagggacactggcatttggcttgttgtccactttaaacagcaaacaccccaaaagc

SEQ ID NO: 682 - DNA, 547 bp, Rattus norvegicus
  Genbank Accession No. AI231028
cagcatcaaacacatttatttcacttttattgagtatacaagaacagagagcacacgcatacagcacggagcactgaggtgggagagcgtggggacgagagaggagagaggggagtgggtgaaaaggaacagaacagcattgcagttggctggtaaggtgcttttggaaaaaaaatagatatctagagtggtttgctcatgcaatttcaggccagtcttcgtgtgtgcttgcaggattcagaaactgaaacaggtcctggcacttcctgtacccttgtgtggaaaagattcacaggaagcgaacgtgggggaaacaaaggtgcatgagacacagcgtgggaagaagcctcagggtgcaactagtttgccctgcttgctgaggtacacgggacggggtagcccagtgtcacgtggtgggtcaggagttgcatcaggacggtcatctggaaccctggctgctctctgaggcttttcccactcggttacctggacccccggatagcaaggtgccacagatacaatgagacactcaaaaaaggcaaaagaa

SEQ ID NO: 683 - DNA, 573 bp, Rattus norvegicus
  Genbank Accession No. AI231044
  misc_feature (1)..(573): n = a or c or g or t
accacccttacttattggctattgagcctttaagggacctcagggcaggttggggattacttgctgtttaaaatcttgtagtccctcttggcagggggagagagtgggcatgggtccccgttgccagttaaatccacgaatcctctcttaatgctctctttccacccctccgtgcactccattttgggactgggttagtacttgtctctacaacctaacgggactgaatgaaaccagaggccagagaaggcaggtcttgggctcccccataaatgtcacttctcagtggttctagggttgggtgttctttggacagacacagcacatagctgagatctcggtggcccacgggttgtatagaggagatggctgatggagccagtaagaggtggcttgctccgggttgatggagactgggttgtaatgggcttatggcctggattgggcaggagggtctggagagtatagctacccnctggcttcatttcatcatttaaagtagaaagactggccttgaacttgtggcagtcctgctgcttttacccccacccccaatgttaggattacaggtgt

SEQ ID NO: 684 - DNA, 477 bp, Rattus norvegicus
  Genbank Accession No. AI231180
ctagttccaggaatagttgttatggggttgatctgaagggggcatttgggaaaatagcatgtttggcctacctgggtgctttgggctgggactgcaccctctccactcagcctttgcagttgcctctccttttcaaatgcttttaatgcttttcaaacagtgagagcttgttgcaatggctggaggctgtactggtggctgaaagcaccccttgcctgcccgcaactccttccccctccaggaaatgcttgaaaggggccatgcccgccttgaggcccccatcttgtgtggtagaatgttatatccagggtggccctgctcctctttcccccaaagtctccctcaagcccaggagaaggggttcttgcaggtccctaggagctgatgacgtgcccggaccaggtctcatgcttcgtccctggtgccaggtgggtgatgaccacctctacagcttgcagtttctcattcttgggcggg

SEQ ID NO: 685 - DNA, 544 bp, Rattus norvegicus
  Genbank Accession No. AI231295
gaaagtaaagtgcatcttattaaaaaaaaatacaaaacccatgtaaattcagggtcctcgtgatgggcagtgtcagtatcccttagagtggtgggcaagggcatggtgagctaggacagggaacagggaggatccagaagtctgtgttggaattagaaaacagggctgatgaggtgggtggcgacacagttcctcaactgggaaaaggacagcaggcaacagtcttctgtcacaacgccccctggggtcactcccttgctttccaggccacagcctgatacaggctggagaagtctgggaactgggactgagcccagggtctggtgaggagggctgcatagccagcctagccctctagtccctgaggtggtggggtgtcagcggtcacagacatgtccttggttggctgaagctggagcagggccctgattctgcagtggcctcagcagcggattaaggcggaaggtagaatgaatagtccagtgggggagggattcccaactccagctcacaaagccacttcatagaagtccccaagagccca

SEQ ID NO: 686 - DNA, 617 bp, Rattus norvegicus
  Genbank Accession No. AI231317
  misc_feature (1)..(617): n = a or c or g or t
atcaaagattcaggcattttataaagtattcaggaatttagagtacccgaggagcttgaggcaggggatcataggttcaagggctgtctgggcttcatactgaaaccctaccttataaaatagggacataaacaaataacaactcattgtccagtagagtccttccaatatgccaggtttgtaaggaaaggtgtctggcaagcctgcaaggctgcaccacaggccagagtccttaggtctgcttcagaggtgcaggtatgttggcagatgcctgctcaaggtangccaaggagccctgaggcatgtcggctggcttcttgtgctgcacattgatgtcttccagcacctgctgccaatgtctcaattttgtcaagtgcttctggaccagagcatctttccgctgcaattcactccttagttctgagacatcctctttgataacttgatctggtttctggacagacaattgcaaccttttttgtaagaaaaagcattctgtctgtcttgcaatgtccaaaaacttctggatacactgatcaacaccagttcgaatttcttcctgatcaatcccattgacataatcctgactcacaagggaagcaaagcaagnctnaaat

SEQ ID NO: 687 - DNA, 454 bp, Rattus norvegicus
  Genbank Accession No. AI231421
gaaattcaaagaaatctttttaatttttgaccattggtaaaactttaccagaaaacaggatgtactttaaaaacttgaatcaatgaaaacatgaatgaaatatgaaattaagactcattctggtggcccagtaagaaaagacagaagcccattatcaagacgaaagaaccggtggacccgagtctctgagaacagcgagtacactgagttccaggacggcctccctccacacccgggagtaactgcgtactgagttagcaacccaaaattcatgttcgcctcccaactgcctcaccggacaaatttagagtcatgattctttttgacatttacagtttagacatataagctcatgttaaatgacaactggtctgtcaaaagtacaggagaagaaaaagcaactgtttaattaaaacctttctagatttttgtttttgattattgatcaagttgc

SEQ ID NO: 688 - DNA, 549 bp, Rattus norvegicus
  Genbank Accession No. AI231433
aaagaataaatatttttgtaattaaacattatgcaaacacgtgccacgcttgctttatccatgcatatgcgctatatacaattttgaaaaatactgtgttgtcctcttgttttaaaagtcatatacaaagtttttgtgttttttgtttaatcctcttgctgcctacccccttctccctcccaagaatttcctttacaagtagctaataatcattattcactcatgaccttagggtatgagagaaagtgaaactgtgtgtggaggtgtgtatgtgcagggcaggaaggggaagaggtcctttaccaaagtacaacgaaatggctggtttggacatgaaaagcagtgtccaggagctgtctgaatgtttaactgtactacactcaggaagaagaaaaggaagtcagctttgagaatgaagctacgttacaagttagagttggagggcttttgtgtgtctgtcacactgttggcggcctagaatactgttgtacaatggtttatctaccttttttattacactataatttacttaaactttccgttaacaaa

SEQ ID NO: 689 - DNA, 542 bp, Rattus norvegicus
  Genbank Accession No. AI231547
cactcaaaattcttcagtttttacaaaactaacagggtggagtagggaagggagcagggaggcagccgcaggggtgggtaggcggagaggcaggctatgcttctgtcttcacctgagcctggttgcctgccacattgttcggctcacccttcatctcagcatcagtgggatggtctcctgcagccacttctgtcttggccttatgttcctcctcagccagcctctcaaacatgttggcatagagcttcttttcccgggcaagctgcctgcgggtccgctgctggcacacagccagctgggtcttggcggctttgttgctgggatagagctgcaggaccttttggaagtcagctcgtgccaggtcaaagtcattcacggccaggtgtgcctctccccggcgaaacaggcccttctcattgttgctgtccagctccaaggccttgttacagctttcgatggcagctgagaaggcctgcagtttcaggtgacacatggccagattgagatgtgaggccagtcggagcgcatggaccttttgcatt

SEQ ID NO: 690 - DNA, 664 bp, Rattus norvegicus
  Genbank Accession No. AI231792
ccccctccccgaaatgtaacaacattaaagccattccaacgtagatctatttctacggctccttgcatatctcattgtagctgaagttagatgtttcagtaacgaaatgaaggttatctcatcaaaatggtggcacatctcaaagacgggtttcttgttcctgtaactctctgcctatccctcaaaacctaaaaccccctacggtccagagctaacaggaagacagcccacagccaaggctaaatcaccgtacccatgcacagaaagggctcccaaacaagcagaggggttagacttctggaacgggcaacttgtttatttatacgggtaagaatagggaagagaagcccccttggttagcgctttgcctccaccccaagttactgcataccaagcggctatgaataaagacaaccagctgactgcaagtcccgcagtgcatgcatcttaaaaagtctctacaacgcggaccctagggagccaccgggttgccagccgagtctgctgtgctgctggggtttggaggcgtggcggctttggcttctagctgttggctttcagtttgtggatcttcgttttcaggacctttcttatccttgtcggctgccacggggcccatgatttcctgcagtggctgctcgggctcaaggttgctgggctggaa

SEQ ID NO: 691 - DNA, 433 bp, Rattus norvegicus
  Genbank Accession No. AI232076
ggagacggagtcagtgtatttattagtgagttcaccatcaggtttccagcagggattacagtaggagggagtgcaatagggaggtgcaggacctgggcgcccttaggtctcaagaaaggaatattctaaagcaggtacggccaacttaaagctggaaaaaatgggagtggaatcccacagaccactccagaacagcagttggtccttgctccaccttttgctggctttcagaggaggggccaggtcacagggcttcgggggacagtttccagggagattttctacacctggtgactggtgtctctcaggctgacttcaggggctgggtgccgagcttgccagcttccaggatgggtctggctggcttctgtctctggactttaaaagaaggttagttcatcatcgtattccttggggggacagacggcaacca

SEQ ID NO: 692 - DNA, 582 bp, Rattus norvegicus
  Genbank Accession No. AI232087
gggtagcataaattttctcaaactttaatcttcacaattattttcactctatacactttattgaaaaggtctagatttatttgacaaaatgattatgaccagaataaagatatcttctttttcatatatcagtaagtggctggaatagttaatttagtcatgtatcctggaaaatgagtttcaaaatcttcctctttttttttgaggtcagctactgtcaataatggacattaggcaatagatcataacacttcagtaacatgctgtgtcagaaccttgcataattcacacattcatttgctctctgctacattatgacttcatggattaaagtttattaaattccaaatatttcttgcaggagggaatgagtaaaacatcaggataatgctgtcttcatttttaaatatatattgttgttttaattgatacatagtaattgcacataattatggcacagtatgacgtttcaataatgtatagtgtacataataatcaaatgaaggtaattggcatgtcacaccagatgtaactatttcctttctttctgggacatggctattggacatagtcaattaattg

SEQ ID NO: 693 - DNA, 612 bp, Rattus norvegicus
  Genbank Accession No. AI232088
ttaaagtgctcttcagccaagcaccgttatttgtttctaatccaaacactttggggtttcttcccatagcaaactgagtcaaaaatgaaaatttccagcataaaaactgttacaaaccaatctaattcattttgtaaagtgccactgaatttagccttcaagaattcaaagtaatacaaaacttccaatatttttgtttacagaaatatgaaattccaaaaatgggattgttttgtctagagcagctgatagcatttgtcaaagccaagaccgcacactgctgccactgtgggtaaggcaggctgctcagcaccgtccacgctgcttctcagaacaggcccaggccgggggcacagctcagcttcacggtaaaggccagcctatgatctgacaggaaaaccaactgcgactgaagcaaagacactcaagaggctctccacctgatgcaccttccctgtgaggtagcacacgctgctgccactaggacagagcgctgtgactgggtgacagattaacaggggaacacttgagtccacagcactctggaatgcagtataagacgcttcaaagcaagttagagaggaaaaaagtaaaactccacctgacaccacc

SEQ ID NO: 694 - DNA, 457 bp, Rattus norvegicus
  Genbank Accession No. AI232210
ctgcacacagttgcgagctttattaatccttatgtagatatgaatatgcattaatacaatttcaattttggcaagataccataagatcgttattcccacgatatcaggaacaactgaggcaaaagtaaacaaaggaatacgactaaacaaaggtttcttctcaaaatattcacataacaaattacccccttcttattatcaaagtatactccccattaccaagagagtgtgagaaccgcgtccacagaaacaggacacagcagaacatagtttaaggccaagtgagaaaaaccttttcttctcaagggtggcattccagcccctacttgctcctgtcaccagtccttacttgaccctgcctgggagctgcatctccatgtctcaacaattccttcttctttcttttgttttaaaagtaacactttccataacatagctaaatgccctggtaggggtt

SEQ ID NO: 695 - DNA, 667 bp, Rattus norvegicus
  Genbank Accession No. AI232268
ccagtgacagatttatataatttcaatgtaaacttttgctgcagcatggagaccggtcatatctcattggtagatgtacccaaagccctcaaccagggcggtgacagctacacttgcttgaaagaaaattagtccttgccagccgcagcaggatcagatcggtatttctccttgccactgtggacagccacaccagtatgacaagttgacagttcccagtgtcttcaagagcctctctaggctactgccagtggcttctggtctcagagctcattgtgccgagcccttgagaccctgctggacaggtcctgcagatgcttcttcaccttgtagcccagctcctttgtcttctcctccagcaggacgtacttctccttgttgcggctgatgtgctcggggtcaccgatgctctccacgtgcttcagcttctggtgggaaatctccagctgcttctggtagtggttgtgcttttcgattttggcctcgaagtgcttaagctcctccctgaacgactccagttccttctcggtgaagttggcagactgagccaggtcccacagatctatcactcggggctcttcaaactcagtggcggggccgtagccctggtggctgaccttcctcaagcggtctaggccctggttgatactacgcaatctgtccttta

SEQ ID NO: 696 - DNA, 641 bp, Rattus norvegicus
  Genbank Accession No. AI232294
aggattaaatgattttattcagtttcacctcaaaaatcatgtttaattaaaaataacactattattaaaaataatacaagacatgtgcattacaaagtaaagaatcggaaaacgttgagggtttagttctaaagaggtcctagacccacatcttatcaccattagcaaggttaggaagttgatttctggctaatgatcatcacaggttctataatacagaacagagaggagttttctaaccatcatcaccacacactaaccatcaacactcaataatagtgtaatatctttggaaaagcgcaaaaagatttctttagtggaatcactttggaaagagtaacaaacaggtctctggattcccaaccttccctccaccatcctgcaaaatccatgctgggttctggcgtgaggtctgggttttaataggaggcacaaggtatgcctaactaaggtcaagctgtgcccaccaccatttgtcctgaggactatgcaacatctctttctgggagccacgttcctcctcaagctggcaccaggctttagccttttccttctcctggcatgaaattcctgaggtaattccagtgtcttgtggtcattgtctcagcagtctatggagccaaagaaagggcacaaaggcg

SEQ ID NO: 697 - DNA, 562 bp, Rattus norvegicus
  Genbank Accession No. AI232332
ccaaaagctttgagctttattttacacagaaaataaaacacaggtactattcggttgtactgtaaacctgagttacattttaaacaagcctatttatcaaaaagttacctaaaatattttttgttgatatgaatagctgtaacggcatctgtcctgaccctatgaagtgtagattttaaaagttaacaaccatattaccaagtgataggccaaataaaatgcttgtgtacaagattacatatatataaagtgttgtatatacaacacgcacattctcaatgaggaaacttttcacccccaagggaatgaacattggctattttttatgtgcaaaataagacatagatacagtacataaaatagacaaagtatatcggtgagggtgcaggggaaacctgttctctctggtatttaagttacataggaattctggaaatgtagctcagttttacaacatttgtggactgtgactacacccagtatggcccacaaggcaagtatccttaagagtgccaatagttgaacaaagctaacccccacttcaaaataaaattctttacaa

SEQ ID NO: 698 - DNA, 601 bp, Rattus norvegicus
  Genbank Accession No. AI232340
caactagtagattttatttcaggtaaataaattcccacatacagtaggaggcttacagcacgaaacagttggcattttattgctagtgcatatagtgtcacagttgatacaatttcattacaagtggaaaaatacactggctgacattggcaagctacaatacatctatatgtcatatatatttctttacaaatcgccagtagttcaagaccgtagaggttatctactgacactactatggcttctcttcaaatataggaattgactacaaatatattctgaaatacatttgtcttccaaagaaacataaaaagtgcacaaaaatatatgtaaaaaatgccttgcaaatagttatcaaaaccaccagggccgtctgtgatcattaggacgtatccaattttatcttggtcccatttctgattggaacccagaatccccactgtggcttcacggcaagattctggcttattcatttttttcatctctgatattcgaaaactcagagcccacggagccactgttgaaatatataggactcaggggcaattgcaaaagtccaattccttaaagttttcaaatttaaaattgcgtttcggataat

SEQ ID NO: 699 - DNA, 572 bp, Rattus norvegicus
  Genbank Accession No. AI232341
agattcccacaacatggtcctctttattttcagtctccctacctttgcgccatggaagaaacaggctgagggcatgggcagaactgtgaactggcccagaagcttcttgctgacatgacagaaaagaggggtgtaaaggaacccccatcttctaatctagttgggggaacaaacatggagtagatctgtgggaggtgggtggagcaacagaggagggcttcctaaagcacaatgggccctgggaatcagtcctctgtcttcctaccagaccctgcccttgaaggcctcttataaactctcagactgtgagctatgccatcactgaggatgaaaaaccaggaggtggacatccatgacattggttcccgtcaaccctgtatgcagcaaatgtgttccaccctggaagctgcaaaagaacgtgtacgagtcattgttgtcgaggaaggtggcaaaatccaggttttcagcagaagcctggctaacaaggtcagacatgacccaggccccggccacctttgtaggcccgtcctgcccatcagtgcctccactcaagaacagcacatcaacaggcc

SEQ ID NO: 700 - DNA, 441 bp, Rattus norvegicus
  Genbank Accession No. AI232461
aaaatgggtaaatgaagtttattttgttcatgattctggaggctggagggctcaaggacacagtggcagcttctggtgagaggtttgtactatgtcattacatagtagaaaggtcaaagggcacaaataaatgcatgaaaaagcgataagaggcagccttgctttatgacaacctgccctatggagactgatccagtgtttgagagcagcactagtctgtttaagggatgtcccagataacttcctccattgccaaactggagaccaactcatgagttctgggggatgtaccacagtattcgggaaggggaaaaccttccttgcagcttactttgcaccagttcaagaaacagtgaagacttgtagataagtaaaagagagacaatcaggacaggtgccccccaagtttttaagtaacgtgagagggaggcaggctcctgg

SEQ ID NO: 701 - DNA, 547 bp, Rattus norvegicus
  Genbank Accession No. AI232494
caaacatatttattatttttacagactctaaatgtactaatgatcctgcaatgcacactggtgtctgtgatgccaggttcagcatgaccatccaaaaggcacctgtctaggggaggcagctttctgaggggatccagaggagcagtggccaatggcaaatacctctgtgagcacactgtctgccctgtgctggggaagagcccccactatgtgtcgcctttggaccttggttgtgagcccctaagaatatttctcaggggattttgatcgacaggatcacactctgtggctcaagcaggcttgtaattctctacatagacaagcctgcctctgaactctcaatcctgctctccagtcttctgcgtactgagaatacaggtatacgtcactatgccccactcctagagaacagttctaaggtcaagacatgatcaagatgcccgtgacaccatggcagagtcatgccaagtttctgtggtttgaaaccttggatgtgagtctcattattcaaacacacagctgcaatgcaaaaggcaccagaaggcca

SEQ ID NO: 702 - DNA, 605 bp, Rattus norvegicus
  Genbank Accession No. AI232643
  misc_feature (1)..(605): n = a or c or g or t
ggctttaaaaatagttttatttttcccttcacagacacacaggcctctgaccataattcatggcaccccaaattaaatatagacttaagagtatatttgtctgacatgattcaagaaagtggattttaaatgtgaatgggtgccaaccatggggactggaggagggtggtaccagcaaagaggggcgtacatcattcttacagcgactcttagacttggaatcaatatgtgctcatcatatacatatttagcccaaatcagtatgctcaggagtagaatttcttctgtctctataataaaaaggccaaagcacttccttaacattcgaaatgtttccctagtagacttggtatagtaagagaatgattgctaaacatcctcaatgtggttttcattatgaaaaaacatgtttcacataaaatcttcataatataatccagaggccaaatttgtgcatgtttaaaatttgagtccaggctagatatttggattttcccccccttccagtgtttttcatttttataaatacatacctagncttctactactttaaacatactcggaactcttttagaaaccatggctgcctttcagtagcatcagtg

SEQ ID NO: 703 - DNA, 442 bp, Rattus norvegicus
  Genbank Accession No. AI232731
ccacagccacataaatgtttattcagagtatgagtcctagtctgggacacttttttgccctttgctcgggaggtaaacctaagcagagttccccctccaccccttttaagtcaacctcctgtccccaaccctttccagcacccaggagtcttttttgcttttccaggaccagtttttgcaccaggaggcattacacccctcccctcccacagggcagccgtttccaccaatgacagagtaacactctaatttaagtcagggcctggagttcaccaagagggggttctgaccttggaataaacccagcagcccgttgtctggggctggctccttaatgatcttctgaatctccttgaactgggggtgggcagcatccctaacaagctgcaaaatgagtgattcgctggtggacaggaaagctccactttgtctaatacggccc

SEQ ID NO: 704 - DNA, 595 bp, Rattus norvegicus
  Genbank Accession No. AI232784
ccaaaaaatcaatacattttatttgatttatttaccatggtttcagaagagacgagagactattaacgagtcgctcttgggaacgacccttacagggcttgttttcatgagtgtcacccaggagagatgctcacccggccagtttgcttttctctgtggctagggagggcctgtcttccagcagggatccatgcactcacagactccaaccgccatcgatgacgacaggggtgccagtcacataggctgactcatctgaggccaagtatacgcagagcagggcgacctcttctgcagatgcaaaccttccggtcttctgtctgtttaggaaagctttcagtgcctctttgggatcatctctggcttgtattctttcttgcagagatggggtgtcaaccgttcctgggcacacacagttgcatctgatgccctgctggatgaagtctgcagccacggacttggtgaggccgatcacagctgccttggttgcactgtacacacatctgttctccacccctttgatgctggaggccacggaagacatgttgataatgttgccagatttttgagcaagcattttgggcaggaatgccct

SEQ ID NO: 705 - DNA, 476 bp, Rattus norvegicus
  Genbank Accession No. AI232924
cttcctccctttcttagatgaagtcttattctgtaccaaggctggcctttaatctgtatcaatcttcttgtcttggtttctcaagtactggtattctgggcctacattaccatgcctgtctccaacaatctagtttttaaaaaaaatatggaaataccctctaatagcatatatgtcatacataacatttcagatcaaatgaccagtagaatttaactcacatttaattaaaacaaagatgccatgagtaacacgagctttggctaagcattaaaattctcttttacacttaggaggagtatacacacaaataaatgatctgagaaatagaaaaagaaatctgattagaatttggagactaatgcaaggagaagaggatattaatacaaacccctgctcgagtgcttgtctggcatggacaagaccttgggtttgttgcccaacaccaacaccatcacacaaaaggaaaaagtctg

SEQ ID NO: 706 - DNA, 549 bp, Rattus norvegicus
  Genbank Accession No. AI233147
  misc_feature (1)..(549): n = a or c or g or t
ggcagtttccaagtaattttattcagaattttgtgtttgtttcctgaatcaataaatactatacaaaacaatgtaaaaatggctaccattttctctcccctgctcccctcacctggggacaagtccctggacaacctcattcagggggttctccctgtagatttggtccagcaaatgaggccagccatgttttagccccttgactcacttttggagatttggctggggtaggaaagcctttaggaatgaggtgattaggttagggaaatgcattattgtttgggggggaaggagacagcgccctgggcanaaccctaccccaaagaaaagggtgtctaaaatgttcacggttccttctttttgcctcaaaaagtgacatttattcaaagagagagagagagaaaaaaaaaacaaaacaaaaaaacaaaaacaagatgtccatcccttggctcccttccctcccccctccagctgttcctgagccctgcccccaggactgaaccctgggctagggccaggtagcaggacagcccctcaaatgaggtcaac

SEQ ID NO: 707 - DNA, 364 bp, Rattus norvegicus
  Genbank Accession No. AI233155
tgtataatactttctttgctattcttctttctttttcttttcctttttgttttgtaaatgtgcatgggtgcctacatgtctatctgtacaccacatgtgtgcaatgccttcagaatccagaagaggatattggctcctctgtgcctaaagttagaaagttatgaaccgtttatggggggtcctgtggattgaacttcagtcctctgggagggcaactggtacccttaaaagcatgagccatctctccaggcactttctttgtcattgtcaaaaccaggaacttcctgtgtacttttctatacaccatttccatttctagggttgccattttactattctagcctacacttaaccttttgctgga

SEQ ID NO: 708 - DNA, 563 bp, Rattus norvegicus
  Genbank Accession No. AI233224
tttttttcatttttagaaaagcttttatttcaaattccattttgcatattgattttttttttttggaagaagacaagtgcattttccttgagcaaaagaattgagttatgatttagggacaggatcttcattcagcactcttaagcaaagtcaaggttagggatgtgatcttgcaggtgaataaatgcttgcttctcccagaaaccgcagcagcggtggttttgttaggatcaaacttgagcttcaggatcttgctgttggggtgccatgggcaggctaacattacaggaagcttacaaggtcagggcccagtgtcccagctgactctattttgggccagagggtgcaagggccttgtcacagcctgccatgcatgcttcaatttcttccacagtccggggtacacatgtcagcagctccatgccactgtcggtcacgacaacgtcttcctcaatacggaccccaccaaagttgcgaaaacgctgtaggacctcttggttaaagaagcaggcttgggccgggtctgccagggcctggtccaggaggtggtcaatcctcgtgcc

SEQ ID NO: 709 - DNA, 474 bp, Rattus norvegicus
  Genbank Accession No. AI233300
tccttggtattttttttttcaagcaagaccatgttttcctaaggggctacaatttcagtgagtctcttcttccggccccaacaaacacccctggctgctaacgttacagacttgttccagcttattggtgctgatgtccaatagccttgggggacctgccttcggctctccacaaggctattttgtttcacaaagtaactcttcaacttacgctttactataaagaaaatgtatccgattctaggctaagtttccaagcgatcctggctcctaggagccaccaacaggagtacccgggaaggccacgcagcagaacttcctcaggcattttcacagccatttagaaagatgtcttcagcgaactcgtccaaattagctacaaacgcttggcaggatggacacgttgtgtctgtgggccaatattcaatccaggtggaggaatctagagggtatatatacttgaaactgaaattg

SEQ ID NO: 710 - DNA, 515 bp, Rattus norvegicus
  Genbank Accession No. AI233433
  misc_feature (1)..(515): n = a or c or g or t
caaggaacacatgactttaaagtgacagaagcccggcttctagaagcatcccccgccccttcccgctatccacatatggtagaaatagccatccttgggagccaaanctctgctcatgctgccaggtctttgggctcctctggagttaacttcatcagtttgtccacgcacagcaggatgagggtgaggaaccagaaactccagccaaccgccgcagcgatccagccatactcgtccacagaagctcggcaacacagggaggctagtgggcagaagtcgacattagcacactgctcgagggtcccggggtctgggtggtgtgtactcagggttgagttgccgctgctggcttctgtaccgcagcacaagtagaaggaggtgaggaccaggctgaataccatggcggcctgcggggcagaggtgaggtacccagggctgcggaggaagacacctgtntgggccatgttgctgcagaggtgctctggggtggggaacatgtgtcctgacctcgtgcc

SEQ ID NO: 711 - DNA, 443 bp, Rattus norvegicus
  Genbank Accession No. AI233437
catgttggaaagattttatttcaattaagcgtacatgtgtatgtatgtacacacgagggcaggggcctatggaggccaatagaaggtgtcagatgccctgggattagagccatgggcatttgtgagcctgtagacattaagtgcagggaaccaagctcatatcctctggaaggaccaaatgccctggtaactactgaaccagcccacctccacattaaaaaaaattgcggttggggatttagctcagtggtagagtgctttcctagcaagcgccaggccctgggttcgatcctaagctctgggaaaaaaaaaatcatcgatgcttaagaagaggccttattgaacattttgcactttaagttcttttttaaacagttattaagctatacattcatttttgggaggagctgtgggtgtcatggcccatatgtgaacatcagggg

SEQ ID NO: 712 - DNA, 475 bp, Rattus norvegicus
  Genbank Accession No. AI233468
gatattctaaagcctttatttagcatcataacacttgttaactccaagacaattaacataacttactggaagctccctaaggccctttagggcaagtacgtcagtcgggttaggttactatgagatcaccccaattaatggggaaaagctactgtacagcaggtctccagtaccttgcaaactcagaatgcacaaggccttctcttacctataatacatgagtgcagcttaatttctctgtggcatttgccactggaagttgaggctaaaggtttgtcattagatagtgatattgattaaaatctattttagggcatttttgtgattttatgtttgaactgaaaaagtctaatgactgatcacaaatgtgaacgtaaatcacaaatgtgaacgtaaatccagagtgctaagagaagtaaatacctgctctggtttagaattttcggatcaggaattctgcccccacccttgtgcc

SEQ ID NO: 713 - DNA, 460 bp, Rattus norvegicus
  Genbank Accession No. AI233493
aacatgacaatcttagcagtttatttacatatgcaaatagcttcacataccttctgaagaatttgaatattttcaacctttaaaagtcacaaaagcatttcagcaattagggggtggtgttggatcagagacttcatgaacgcctgctgggatgacatcatgagcctcatcaagagcctctggaaggcttggggtacctgtgcgagggtgtggagagaccacctttgtgtcaacagcaaactctccatttggctggttccccagaaactttggacagctttgggtggaagcaatccatctctcatcgtaacatcttggaaaacgccggaaagatgagaccaccacagctttcttatgtacataggatgtttggttatttgaaaaaccatcaagattggatgggatgtagtcacaggcccagagattgaaatttctagaaatgtgttgcttttgatctggg

SEQ ID NO: 714 - DNA, 504 bp, Rattus norvegicus
  Genbank Accession No. AI233530
agagaaaataatatcacttttattgaaaacatttaagacattattatggatctcatacatggaatacacttatattttgtatccatttgtctgccagtatttaataagtttacagcccattcaacataacatggggtatataaaaactttggggataattcccaaatttaaaaaaaagtgataacatctatactatatcaacttaatcttacctcaacaggttgtgcagagtcaagagagctctaccacagccccagtaatgcaatggcaaagagaaggtgtggcaagccaaatgttgagaaaaatttttatctgaaagtctaagccagtagagctcaatattatctacatgggatttttttatttgtctggtttttaaaagaggagccaattatttctgagcactgtaaacaattgtactatttaaaggttctctgaaatgactagatgtattttattaatgaatttaagaattaaacccacaaaagcaaatgctatttccca

SEQ ID NO: 715 - DNA, 345 bp, Rattus norvegicus
  Genbank Accession No. AI233583
tttttagtggggggtttttttttcgtctttgataatatgatttattgtccattgacagagcaaacgcataaaaataaaaagaaaggctgacacagagcaatcaggcgcactcggcttgttgactttcaacaactctcatgtacgaatcgccggcggcgtggggcgtgggatgagggggttggggtgcattacaccagctacggctgtacacaggagcatccgtcacatgttcaccttcagcactttcccagtctgccgatctttctccacacagtatcagctgtcatagaactctgtgaaagtggttgctagctcataaatggaatcacacagagtgtggagaaa

SEQ ID NO: 716 - DNA, 687 bp, Rattus norvegicus
  Genbank Accession No. AI233729
gccaaacaagttttaatttattttcaaaggaaaagtaaccaagaaatcttattaaaactatttattcctgtatacaaataatacaatccgatgattctaaatgacttagtttttagagactacccaagattttgaggcaaaatcagataaggaaaaagaaaatatggttaagagaatccagaatcattttggcttcattttagttttaaacaaggtcaagagtgtacccatggaaactttgagaaaaccagtctttgaccttgcagcaaagactccagtagccagaggactcagaaaagctcgagtgctcttaggctcctgctgctttcgctatgttccaagcaccaggtccacacagcatttaagtaggaacgacactgctgatggtaagactgtgtccgaaactccatgacagctctgggaaggcagacgtcctgcggagtggagcatggatggaatcatgtaccttgagaaattctggtctgtcttagacggaatcagtcagctccttctacggctgttgtggcaacaggtttcacgtagtatggcccttcacttaggtacgttctgagcctcaaataatttgagttcccaaagatctctgcaactgtcttggaattggcgagcgcttttaccagttcgtatttcgcatcctttgaagttttgtcatgttccacagaccggtcc

SEQ ID NO: 717 - DNA, 587 bp, Rattus norvegicus
  Genbank Accession No. AI233771
gtgaaaaatgtttttattataatctcaaactttcagtgtatatcttcattacaatcattggtacaataaatatggaaatgctaagcagacaattatcacagtggcctatgggctgagggacagggacccagagatactgttacccctggtacttcctcagggccaatcaggaggtcttcaaagagtatagagagggagaggaatagaaatattaagactgtcagtgcagcaaattttagaatgtccattaaagccatggatataggatttgctataatagaagacagatactaacaaagaacagagagactcaagttttcctgttagaggcagaggaaatattacagaagccagtgccttcctcaggtccctggtgtgtgccccccgcccacccacgaattgtgtaggtcatctccacttgctatgtgcccagccctgtgccagcccaggctctcccaggcacccaccttgcacctcacacagcatagttaaggagtgcaaggctgtgtatcatataccacagcactggttttcctcagtggtggccaggtgtcccacagaatgattttgaatctgaagaaagctgc

SEQ ID NO: 718 - DNA, 629 bp, Rattus norvegicus
  Genbank Accession No. AI233773
aggtctacacagatatttattcttctacaaggctgtgaaataccctaaggtacccaactgggattgaaatggcttcatctggctccttatcaatgcatctcttgctttggcagtcataatcaaaagaagggacagcatccgtgtctgctatagggactgaagatgcatacacaggcagagcccggatcccaccaccaggagaggattctggagaatcaggagaggattcagcacctccatcaaatgtcttcccttctctggtcttcacgagaggactgagggcaccacttggtgctgtttggttgggttgggttgggttcttggctgtagagaagagttgagctgcaagcccagcataagcatctctaggctgtcagcatgccctccaagacaacagcggctccgcccttcatgtcaacccgcccatcaggtcgcagggaaatgtccagctcccctcctcggcaggaacactgaaaggctcgcatctctttcttcccgagctgctgggaccagtaactgctgagaacggtgtgtgcagatcctgttaccgggtcttcaggtacaccaacccaaagcgcaaagtatctggagtagaagtcatatggggtcgtctggagaatactggatgt

SEQ ID NO: 719 - DNA, 389 bp, Rattus norvegicus
  Genbank Accession No. AI233806
aatgctctgaaaacactttattacacaaattacattcagattctgaaaaatagtgttctaacagtgtaaccatctaaaaataagacatcccggaaacacaccaactgaggagaaatttaaaaaaagaatttaaatagagactttttaaaatttctctcattgcaatataatgttagtgattttaaaaaaatagaaggagatttagcagcttttcgtcgtgtggcaggttggttctcttcactgccacaggctgagaatgctgaacaggaaaggcaccaaagaaagacactggcgatgggtgtggactgggagaatactgtgttcaagcagagaatagggctatttacatccaccaactaaaacgtctccaaatgtgaatgagctaaact

SEQ ID NO: 720 - DNA, 565 bp, Rattus norvegicus
  Genbank Accession No. AI233916
aaagaaaaatccagttggaaacacaatttgaaatagaatattttcagtacatatctaagtagtaaaatagcacagcgtaaattttttcattccagtgattcatgtatcttagaattaactttttttattaacaccaaacttgattgttctcaaagttttatagcatagctctgtggttttctggggaagaagcacatggcctttacttttgagcctcagtctatttgtaattaaaataagtaaactgggtttcttgtttatttgggccataaccagtttatacttaagttcactgtgtatgggaactaaagaattctaatgtcatacataatgagacttgatttgtgtatgatactagtcctacaaggtgaaaaaactcctgtgggctactacccccagcaggccaatcccagttattccacttcctaccctccagaaagtcttcctgagctggacactgctccacctcccctggctgctctgagacgcggaactgagaagatgcttgctggctaatcctgctcccgcggaggaataacacgttagggaggattagtgagtcaga

SEQ ID NO: 721 - DNA, 489 bp, Rattus norvegicus
  Genbank Accession No. AI234293
ggtgcccacatttggcaaatgatagtttatacatacacacatttacatatatacatattttaagcttaaagccccagcttcattattaaactctgcttaggctgttaaaaagaggttaaatggcaagaatacatatataaagatcaggaaaacaggaaataaccctaatgtataaaccaagacactttttaaacaaatcttgttaaaacgactacagcctcatatatttacaagaaaagtcctaatgtactcagtgtggcttggcaagctaattacgttcctttttatcaggaacagtcagcgtccagtgattcattcaggttaaaggcatcaagttcacagatcattttatcacatgtatgcctttaaaatgctacacaaatgcatgacagcaatgttcagcttgtagctgaaaattttcttatgctgctggacatttgacacagtcttacgcattttggacaagcgcgctaaactcaaaacattctt

SEQ ID NO: 722 - DNA, 449 bp, Rattus norvegicus
  Genbank Accession No. AI234620
ggccgcttccattttttttttttttttttttttttttgagttagaatcaagccaccagatttttattttcatgccataaataaagttccctatcactcccattttcttacaaatacatgaaatacagagaagcagaaattcatttggtgaacaatcagcttttgtatatctaagtgccaatgagataatgaagacctgtgaggcactgaaagtaagactagcacaccatccagtaccaagctcttttcatttcagagctagcagacagttgttggtgcctgtctttctggcacatcctggctagttattctagcaccacgagccaggcattgtggattctggacacatgttctagtgtagagcccagtctgttcaatgagaagaatcactactgagcaagcactgctgatagttggatcccagtcaggaaaatggaatggcaagaagga

SEQ ID NO: 723 - DNA, 669 bp, Rattus norvegicus
  Genbank Accession No. AI234858
gctggacaccttaaaaactagttttatatatccaggagggttcagagggcagggctgagccacactgcaacaccttagcctgtctccctccgccttacaaagcaacattgtacaaaactgtatttacaggaaaacaaaatgagaattaagaatgtgtacaaaagtagacaagagccagaaatcacacatgcaggggcggctttgggaataaggaatacggagttccacgccgaagcgcagggccacacactatgtgaaggagcagaccccagtgccaactgaggggaccaggcgttcagctgcagtcttaaacgctacaccactttctcctgctgtgtggcaagagccagacaccagtgatggaaacaagaggggctctctggcgagccccccgacaacgatggattcagaaagcatagcgggtccgaatatcctcaagcttcttggacacttcaggtggggttcggtccagctcttcagagacatttttctgcttgttgggctccatggagttgaactgctcacaaaggtctccatcaatcacattcttaacagggaaataataagaacgaaagctgaagtggtcacgaataataccactgtgctttaaaactaacaaaggcagccaagtgtggttgcgtacacctttaatcccaacactccaggggt

SEQ ID NO: 724 - DNA, 510 bp, Rattus norvegicus
  Genbank Accession No. AI234887
caaggcaaattgatattcacatccaaagctggttgggacggcagcaccaagacctactgcttgggcaggttaggcccttggtgctccagtcatcctgctgcgccaacacagactcggcttcctgctccaagctgccccagtcctcatcatcccatctgtcggcagtggcgctgtcttctgcagcgtccttgtcttcttcctgtgtttcccggtggcctgaggtcgcaggggtggcagaggcaggggctggagctggagcagggtctccctctggcactggtctctggggcacagcggcctcagacggcacaggtgtggggtgtgttcggatcagcttggaggtgagagatgacaccccggtcacagcccagcctgcccagctggctgcagctcctcctgttccagggctggatgctgcatggacgtccttctctatttctgccaactgggtaggatcctccgacacagactctaatttggacaggaagcttcgaatggtcttaaaggcct

SEQ ID NO: 725 - DNA, 460 bp, Rattus norvegicus
  Genbank Accession No. AI234939
cctcaagtttcagagatttattcatcagtgtaataaactcaaaaaaaaatcaacatgatttcatgcattcggagacatagttcctgcttaagtggaaaattgtgcggatggcttctgaaagaccttcattgtaagcagctttgcagtgaacttcacagtttaaaagtctgggccttcttttttcagtttgctgtagtccacgttcacagaatagaacttatattgttcattgggacccagtttgttaaccacagggaaagcacggtagggtccgactgcttggtagacggttcatctaaaaccaaaaggcccaggtggtcaggctttccatcaggacgcggcacctttaaaaatgcatcgatatccccaacagctgggataaaatcaggaatgaaaggtttcagtttgtggtccagatcaatcaactgaggtgtgtaccggctaatgtactcaaagagct

SEQ ID NO: 726 - DNA, 582 bp, Rattus norvegicus
  Genbank Accession No. AI234969
ccagggacccagtagtccccgggaaggagaagcgcggggacacaggcggtggggtgtaagcggctccctcagctccagcctggctccagcccgggctaccctgctgggtcccaggcccagcacccgacgggccggccccggagctgccacccgaggtggctccagaagcagcaccactgcctccgccctgcaggtaggacaggcccagcacagaggacggcacccgcggagtgggcacgtagacgggcgaggacgcggcgcccgcactgtgcatgaaggcgccaggtccacccgcttcgtaggcgcccggcgggggcccgtggttggcggccatagccaggctttggtacatcgccccaagctctgagcttcggtgtgctcccctttatttgcaagtcaaggagcccacgcgggcgcggcagaccaaagcgacaagaattggaatacaggtgtgcagaactgtcgcgaaaacggagatcaaaaaacaatgaggacaggcccaactcgctcaaaatatatacgaattaaatccagcatcagagcaacaaatctttaggctctggtttgctcaagaagaaaaca

SEQ ID NO: 727 - DNA, 597 bp, Rattus norvegicus
  Genbank Accession No. AI235047
  misc_feature (1)..(597): n = a or c or g or t
ggccgctcacttttttttttttttttttttttaaaaaacacaactgcagtttattccagccatgtttcccaggagcagagaaaagctacgctccccggggatagcctgtcggttgtatctactattttgcaagcctgaccttgcatttcgaacacctcaaacctcttgttctgtgcactaaggagaaaaagtatcaaatcgtaatttctctcgtaattggaagtagnnntttaagccgaaaggaggccggttttgccgtacagtcaccataacatcactgtcatcgagtaacacttgcccttcagggcaactaaaggtcggtcagctcatgttcctcacactcctcccccatttcctttaggaagtgaaaggctactacaggaaagcaaacattcaaaccatcaaaattcagacaagttatttcaagataataaaaaggggaaaacgtgactgttaggcctgcagagcacagaactgctggaacacagccaggatgtgaggatctaactctgccgtgaagagcaggttctccagggtcaccatgtactgctggattatctggtgatgctgtaggaagatctgctgcagcctctcgat

SEQ ID NO: 728 - DNA, 516 bp, Rattus norvegicus
  Genbank Accession No. AI235059
  misc_feature (1)..(516): n = a or c or g or t
aacactggcacctccacttagatcgggaggcgccgctacccaggagagttttatctaaggaatgaacatgggacagagaatatggcaagaatagaacctgggagttttaagctgacaaaccacttaggaaaagagtggngcgccncttggggcnnantangaattttnntggtttggtttcccctttggcttctccagttcggaagtcacgaacgcttccaagggcccacgctgaacacgcacagacccgtatggctgtcaggctactcagtctttagttggccattagggaatcacactcacgattttcaaaatactaaaattaggttaactaccacgatgccacccaggaaaccaaacacacggaagctacgcgcgctgcgtggcctctctcgtgtgaagaaagtagcagtttctagtaacaaaagccaatactggcgggtgacagggagggctgacgtcggtccactttctaggcaactttaaaaatccatcaaaatcttacgaaaataaata

SEQ ID NO: 729 - DNA, 486 bp, Rattus norvegicus
  Genbank Accession No. AI235224
caccatttaagagaaagaaagatggaggaaaggtaaacagtgttcaggcttcagcttttgccaggggaaggcttcgggtcatcgagaccccaaggtattgccaggtgcacaaatctggattccgtggcaggcaggcaaagtgatcgctctggtagcccttctcagagcccatgaggatctgatctgtccacagaggctctccatggctggggtgtaggcgaaccggaaacctgtggcatttcccacagcgtcgaatcctttgagcatcttagtcatcttgatctcataacgctggtataaggtggtctcgatgatttctggggaacccatgaatttagcccttataaccaggtccgagttgcagaaagctgtctgtgggtgggttggggcacagctacaggctttactggaagctatcaatgatagcaacaagaggatgccagaggccagagatgcaaagggcgccatcgtggtatctctagcgtg

SEQ ID NO: 730 - DNA, 442 bp, Rattus norvegicus
  Genbank Accession No. AI235277
gacagtggtggtgagagatttgattgagatgccttatggagtagtcgcattctgaataaagcaccacactgtgtcagtccgttcccacactgctgctaacacagctggtttgcttagggagtgcccaacttagccagatcaagggaaccccaagagagcaggggcaaatcctgcctctggtgccaagcctcagggcaggcaatcctggagaacactgccagccttgggaagcttgggagacctctaggctgttttcccttcttttcaaatcccacaatttcctgacggggagaagctgtaattagcccagaccaggcaacagatctcagctagaggtacagctgcagggaaaaccccatggaatcttgggaaccagtgtttttccaattacaaggaccgaggaataaactttttctgtgggttctattgaaaccctcgtgcc

SEQ ID NO: 731 - DNA, 481 bp, Rattus norvegicus
  Genbank Accession No. AI235313
  misc_feature (1)..(481): n = a or c or g or t
aaaaaggaaatgtttattgttgtgttacaaggtgattataaactcctctaaaaaaagcaaagatggatttaaaatatcaatatacatattcatctaaaaagcaaaagagaaaaaaaaaaaccgaaaccctgcaaaatgcggggtcgccgtaattaaacatacacagagcttgtatactgcaagacaggtcacacaccaaggatccttcaaacacaaacgctcctccccttcttggttggtttcaggttacttcctgcatagccttgggctacatggaggtcaaaggcctgcccatacaccctggctaaggctcttcacattagcagtgtctttggccctcagtttcctgtggtacaatttgaggggagggtgtatcaattcctagttcccgaaggcttcaaaggaggaaggaaggaaggaaggaaggaaggaaggaaggaangaangaanggaggaagggtannatggggctggggtgagc

SEQ ID NO: 732 - DNA, 492 bp, Rattus norvegicus
  Genbank Accession No. AI235414
  misc_feature (1)..(492): n = a or c or g or t
gtaaacagcagcataaatacctcccgacgttccttccaagccttctcagctaaacttgtgtttctggtgtacatgcgacacggcgacagtgaacacgctagcatttaatttaaaggaaaacaaaaaggtgcaaacggaaagtgccttatcaattcaacaggaaaagctacgccagtcactacattttatattaattaaaacaatatataaacaatatctctttagctatatatagtcttcatgcccatttaccctgtgtaatatattataatgctattgttgcgagcgcttatggagcccctttccacgccatcctgctgaccggcaataatcggtgagagaaacaaaaaaatcttccttcatgacacagaaaagcaagctgtgcaaagtaacgccgtaactctggccatacacaccggggtcaccgattaacgctggactctgctgttacncgtaagtctgtgggcagtgagctgtaagaaaaggggctcc

SEQ ID NO: 733 - DNA, 384 bp, Rattus norvegicus
  Genbank Accession No. AI235585
aaagaggcccaaaacaactttatttgtatatcaactttggctcccatctgactagcccaggatgagggcagcagaggccagccaaaaccagtcagccaataaagacatcgcccaggatccagagcggcccactgggagggggtatgtccatccccatgaagccactcaggcagatcgtctttccagcctgcgataccttgagtatgtacttctctgggtgtagttcaaagttttggcctcctagcttaaaggtgataatgggcaggctggacaccttctcacaagggatcatatactcgccctggatgagaggcactgccccaatggccttctgtagttccttcacctcgtccacaggccccaccagaagagacgtccctgtgt

SEQ ID NO: 734 - DNA, 512 bp, Rattus norvegicus
  Genbank Accession No. AI235631
ccacgcctctcttcctttattgaggcctagagcccaaatcctgcaagctgggctccaggcccaggccttcctcagggcccacagagcccacgaagcccagggggcacagaagggaaccccctacacacaaggggatccccaacctgccgccccacctggcacacaggtcagaagcccctttggggctggtatcagatctagcttaatccttcttgctcccgtgttgctggctgtggaacttctgatgcaccactcggagggtggtgaaaaaattgccaaggaagaggaggaggaaggggaggcctcacatgagcacctgccactccttgcactcagggtgccgggccaagttaaacaatgtcagcgcattaaaaagctgccagaaatgtccaaagaagaggaacggaagcaggaaggtgaggcctctccacatccaagactgaaagccctccacagggaggtccatggtgtgtcgttcgcccagggctcgcataactagttagcatgccaaa

SEQ ID NO: 735 - DNA, 441 bp, Rattus norvegicus
  Genbank Accession No. AI235739
gaaaacaaatcatggtaagaatttactttgaagacaatgatagaaagttagtgttaaaaatgctaatgttcatgttttttgcagctattgaagctacaacctgatttgggtttgctattttcccggcttgtgtagagtcccattgcagggaaggcagtaagcctggtaggcctgtctgtgaactgaggtgaaaagcgagggaaggtgtttgcgagcatccaggtaacaggcaatgacatggtccttcaatacagaatctcctagacaccagaggtttcctgctctcactgtagaaagtcttctaccaacctgttgaattcatccgcaaagcgcaagtgtaggttatgcttgccctctggcatcaggtgcaaccatctggcagatgtttaaactggtttatgccgtccacccacttctcacaggttttggcaaagtagtcat

SEQ ID NO: 736 - DNA, 538 bp, Rattus norvegicus
  Genbank Accession No. AI235935
ccagttcaaagacaaaaactggcttggcagcacagtgctggacagtgcaatccgaggcctggcctcccatccccaacacaggtgagggaagggagagctaaaaagctgaaagaggaaaccccacagaaggaaacattagtttttagttcacactcctgcaatcccctagcctccataaaataaactttctaaagtaaaagcagcagaaatggtgtaaacgctatcggaaccgagagtaactttgctccttccagatgtggtgcaggtccctctgttgaacaccgcttggctggaagcagaattcatcttgcatgaggaaagcagtctttggcctgtctcaggatttctccagcattgcataacaagcagatttcaaaattcattttcttctccaactgcagcaaaaaaggcaaggagagacctttttgtttgaagactctggcccagtcctgtgagagttcgattccattagaacaagcctttaacttgctctgtttctgtgtcaaggtctatatcgtaaaagcagggtcgggtgggc

SEQ ID NO: 737 - DNA, 587 bp, Rattus norvegicus
  Genbank Accession No. AI235951
aaagaggactcataataactattttaattacaggtgttaacatattaacctaaacttcactgtcacagaaagacatcccataaaattcagaaaatattcaggttgtggtgaggaagatcaagccttttgaagacttcaacgcactggatggaatggctcaagaatttcagcataagttttcttctctttctcaggaaaatcttctggatgtaattttatatacccgaacatgtcatggtccctcacagcatacagatagttttgacgttttaaataaaaatatccagcaaagaaaaaggaagtaacatacagaagctggcgatgcaaacctgctttcatcacaggtctcattcgcatcatgttgtccatcaggcccgtgcagtagcccaggaagccgatgtagacaagccgcgggtcgttcagcttgggcgggggcagtctccgggcctcatccggcaagaatcttaagggctcatggcccggccggccgttcatcatattgatgcgggttccacgtgaggtctgacctcgactccaactataagaaaaaccacgactacaaaccccgcgacctagctcctcgtgcc

SEQ ID NO: 738 - DNA, 482 bp, Rattus norvegicus
  Genbank Accession No. AI236027
gaaaggagacacaggaagttctttattgtacattggagaaatagccctgtgtgctggttcaaggtgcagcatacagaataaagaattaagaaaagaaggaactgggactggggtggggacctcttgaggtccaaagttgcaaacaaataaaaaaaaaaagtaaaagattcctcacgcaagaggcatttttttttttgcaaataccatgcaaaacaggcagctggcgagagccttaagagaacccctataaataacagaaaagacactccaagcgttccagtacgaagactcagagcacaggggagaaaaggaaaccaaaatgccttttggcgtttcaagatatttggcactctcgtgattacattgttgttgttgtttgttacagtccattaaagagaataaagtgacacgatattgaagaaagaggggttcgcacaacagacccccaaggggaggttagaaaaagctcgagcatgttttgg

SEQ ID NO: 739 - DNA, 561 bp, Rattus norvegicus
  Genbank Accession No. AI236061
agaaggacaagcaagggaaacaaacatttattgagccaggcactgagctgggtattttcaataatgacagaaatagaaatatagtgaccatattattctgggatgtctaagattccatttggcaagcattatttttagcatgcagtaaaaatgtgagagaaattagcataatcttcatataattgacaaagttttaactgtccatgttgtcccaacaaagttgatggagacaaatgaatagattcttgaaaactaggaagtacaatgtgcaataactcaagatttgcagagtaaaaaatgtaggaggataaatcataagaccctttaaccatataaccatataaccctttaatgctaaaagaaaacagttgatatcacagtagtgacacataaaaatgagtcttttaagttcgaaacaatgttgtttctgataaatacccgactcttccaataccataatgtatttgatgattaaaatcaaatcaagagaatattgatttcttgggagtttggggaaattaaattgcgaatttataattacagatctggcagcaaaaaatt

SEQ ID NO: 740 - DNA, 495 bp, Rattus norvegicus
  Genbank Accession No. AI236150
cacagctcagttttaggtgttgagttctttggcgtctaggaagaacattctgttgacttcactaatgggaatgtctcttaatgctgggatggcgtcctcttggtagcttttcctctgttggtttttagcatagttatctgtgatcgtatggatggagtcaagtggagaggtactcatcatgttgattccaaataagagcacgtaaccaattacaaccgtgatcaagagatagacaggcaacgcaaccgcccagtacttttgaggccagtaagttaagcctaaggagtttagccaagattcgggaacgaaagcccacacaagatagagtatgaagccaaactgagagcttaggaaaagaacaaagccataaatcgctctttctggcaatggcgacggtgaattttccaccatcttccctgtggctttagacaatctgaggaaaagcaggggctgccaggcgcccccgccgcttggcgcaggcgcacggcgtccgca

SEQ ID NO: 741 - DNA, 575 bp, Rattus norvegicus
  Genbank Accession No. AI236332
aaaaaagaatcaaaacagaaactctaagtaccagtgtgtacattgtacacatttaaatgactcacaagaatgaagttttgtttttcatatataaagatgataccaccttgttcttcatcaaaagatgttcaagaattctgcctccaaaccacatacatgactgccattttaaacagaccgaatttcaaacatgcaacaacgccactggtaataaagctttggaatggatgctcactctattatttcactacaaacgagatagaaagccggcgagttggaaattttattctaaagcacaatggaggtggtcattgtctataccggcacacctcactcctctgctgccatttttagcaagtattctttgtcaatcttgaatagtctccatccctcttcactggacagatccgaagcacctcttcttttgtagaagttgatagatggttcattccactctgctaccaagaagtgcatactgctgcagcgacacttcatagcaacctggcttagattcttcaaaatttctgatcctataccaaagcctcggtaatcactcatcacaaagaagtcttcaa

SEQ ID NO: 742 - DNA, 500 bp, Rattus norvegicus
  Genbank Accession No. AI236366
gacggacgcaagatggcgacggcaactatagctctccaggtcaatggccaacaaggaggggggtcggagccagcagcagcggctgcagcggcggcggcggcagtggtggcagcaggagacaaatggaaacctccacagggcacagaatccatcaagatggaaaatgggcaaagcacaggcaccaagctggggctgcctcccctgacgcccgagcagcaggaggccctccagaaggccaagaaatatgcaatggagcagagcatcaagagtgtgctggtgaagcagaccatcgcccaccagcagcagcagctcaccaacctgcagatggcagctacgggcagcgggcactggctatcatgtgccgggtgtatgtgggttccatctactatgagctgggagaagacactattcgccaggcctttgctccctttggccccatcaagagcattgatatgtcctgggactccgttaccatgaagcataagggctttgccttcgtg

SEQ ID NO: 743 - DNA, 526 bp, Rattus norvegicus
  Genbank Accession No. AI236590
tttttttattttttcacaaaatagaatactttttattataaatttcacatacagaagtacaaaccacaaataggagcctctcgattgacatcctcagaaaacctaaaatacaggtacaggagacactttcccaagggtgctttcaaatgctcaacatcaatcattgaaatgccccacgagctcgtgcaaagaggcctccattcctcctccagacactgaggggagacccattttctttatgactcaggaccctggggtgtgtgccctgagagggaccatgacattgtctctgtgttaaagaacttgagaggaatttgcaaaccgcactgctggggagaaaacaactgatcctgcagctgggttgtggggtgaagccaaactgcttctcctttttttttttaaatcttcagtttgctaaaggcccaaatgctatcacattaggggcctttctagactttgctttcaatgattggagaaaagagaggagaaattaacaatgccatcatcttttgtgggggtgggggag

SEQ ID NO: 744 - DNA, 625 bp, Rattus norvegicus
  Genbank Accession No. AI236601
agaaatgacaccacagggtggactttattttaaagctcacaaggtgttcacaatgatcacatgatccacacgtctcccgtgtcacacctccacgggacagtgcatgtatggtgatagttacagccctgcttcgcatgctgctacggttcactagctgttgtattcttggtaataataaagcaaatcactctactggacagacttaatttggaaagcccttatgcagatcagactcagtctcatatgaacaaccccggccacacatgcggaaatgaagagcaaatgcagaagaacacagaaaaccccttggcaagaacagctgctgcagactgagcccagcgctgtcagtgcagttcacgtcctcagaagacaaacgacctccctcctcagcatatgagcagcaatactgtacagagctcagtggggtcccaactccacaggagcctgtcaccaaagtcactctcatttagggtcagagactacagactcaagctttttcttttttccctcataatacacaaaatgtctagacagtctttaaaaaaaaaaaaaaaggaagaaagaaaatataaatagactcagtctgtcatacagaatcacatacaatggcaaacacatttcatga

SEQ ID NO: 745 - DNA, 548 bp, Rattus norvegicus
  Genbank Accession No. AI236616
gagccgtacacttttttttttattattttactattaaactttctgtaaatttgaaattggttaatcttaaagaaaaaaactaaccatatatttgtctttatacattatatacactcaagaaataaatagtggtctgagcattttttttttaaaaagcaacagatatacaaaaaaggcttcaagccaaatggataaatacacgacccacagaggattcagctctcgaaccttccattactaaacacaagctggacatcacaggatgcatggccaataacaagcttcactttggctaaaaggcagtcgcaaaagcacacccggggctcgagagggcactttgtgtgaagggtcaactggctatgtcttcaggactttggcatgaagcagtgatagaaaattgggacggtacagatacgaagaaagcccatcacgaacctaaacacagtgatcactctcccacccccaagccgagagcacactcacaaagccttgccccttctcccatgtgctctcctgcttggatcttaaaggaaagggtttggatttta

SEQ ID NO: 746 - DNA, 652 bp, Rattus norvegicus
  Genbank Accession No. AI236753
cactacaagtcattttaattctaacacttatgtcaacatttacagcataaatcactcatgttataaaagaatcattccttcatctagaatgtgattgaaattagatattggtaaacaggcaatgtaaatacctcagtgtttgcctctgatagtttgcaatgaccaagacatgatactatagcctcatcaagtgcaactttgtacatgtctgatgcatatatgttgtgtacatgttgtggactgagaggacatcttcaggcactggtcctcacctcctaacttgagataatcttgtttgctgttgaatgcatcaagctagctggcccatggtcaaattttcttcctgtactaaaatgtacggcagcaatgggataaatcttaggttaacagtatattcagatgcactgtgtatagcaataaaaagctccagtgatgttctctttctaaagacacactgtccttctggggaggtgggatctgactctaatctggcaccatgtctagctcattttacaaaattaacctttacaaagatctacatcagcatctagaagagtcaccaatcaatgatcaagaaaactgttatttgcttttctttctttttgactgggtaatttccttaagctacattattatgggctaactggaaaac

SEQ ID NO: 747 - DNA, 570 bp, Rattus norvegicus
  Genbank Accession No. AI236754
ggaggcacagctggttttattgcagatctgatggtgaaaggttaggtctgaggtcttcctagttggacactcagctggccctgtgactccagcacacaccgacagcttcaggggtcccaggcccctctggtctatggctactgctcccaccttgggccttgactcgcctgaggatagggcggcctgtgttccccatacctctggggcagatagtcccccatccacggggctcaagtcttcccctcctgcaggggagactggtccccgcatggaaaatctttaggcgggctcatgtgccactgggctatggtgagccctcttcctcctcagggattgggtgtcagagcatcaggctagtgttaaggtggcttcctggtctccttcttcagcagggagctggcagcagccagggctccaccctggacgaacctcacaaagttgtccccagccaggggccctagggcatacaggccctcctgttgagtgctctcatgggtgaacgggtccacatcgatggggttcctcttggggctcagtggctgactggggtctatggccaggtcagcccct

SEQ ID NO: 748 - DNA, 655 bp, Rattus norvegicus
  Genbank Accession No. AI236772
gaaagtgaaagaggctttattttcaatatcatataagtcattccatttaatatttatagtgcatagttatgtatgaaagcatacacggaaaacattaaaaaatacccaaggatgcgcgtgcacaggcaaagaagacagcctttgtgtctatagcaagctcagaggtagcacaagagagtatccatctggtaacattggaaatcatgcaaacaactgagtcaaggcatggcattaaggtgacatcagcatgagttataattccctgggtacaaaacctatatattctttgggtttcaaaaaaattaaatgaatggcctacttttatcttctggacaaaaaaacaaaaaaaaaaaaatctctaagagcaaagtgcacatattgtcctaaccacatacatataaaatattcaaggccacagatggaggtcgctagatgacaaaagaggatactgagaggtaaagtaaccagagagagatgcaggagggaaaggcccctctgcctccatgggggatgcaaaggcttaggcactggaacacccaacgtggaccacactgcctgccacaaggaactcctcactgagctgacgtcaccatcatcaaaccgctcgacaggcggttgtaacttcctttacatttcccatgggggacaagcatgg

SEQ ID NO: 749 - DNA, 428 bp, Rattus norvegicus
  Genbank Accession No. AI236795
attttgcatacttttaatttcagaacaaaataaaacaaacaaaaaaacacaatacacaacacccaaccctgctattctgtgggaggggatcttcctgccttaaggcacaaggacaggatagaagagattcttgtagacatgagcagagagccaggtgggtcagggccagtcaaggctgttgggggagccacagggatactatacagagggcgggggcttcccaggagcctttaatccacttcttccatgcgagaggcatcctctcctctaagtactctgtctggtcttctttgaggtgaaggatcactttggtaccccggccaatgggctcaccgtggtctgcacggacagtgaaggatccaccagcagaagactcccaggcatactgctcatcatcgatgtgcttcgtgagtgtttcttcaccacct

SEQ ID NO: 750 - DNA, 481 bp, Rattus norvegicus
  Genbank Accession No. AI236863
agagtagaggaaaatctatattcattaaactaaaaattattgtctattcaagttactcctgtggctactcggtgcacatattttactgagagaagaatagtcaggcttctatggaagtctgtcccaggggtgagtctgtcctgagcccagggttctctgtctcttccacagaggctttcactaatcagcctacccttgagattcattgacctagcagcacacacatccaggggtcagaggccagggcaagttccagacccttgctcttttgcagaaatgttgtccacaaaaggaaagaccaaagttgaaaaagacactctctacatgctgatggaggagtgtggcagtgagagagggaggggacatgagagtggcaattgacaaggacagtcagacagtcagtcagaagggctcagttgacatggtcacttcctgagtaggatatgaaggaatcgtgtattagtgggtctgcagggaaggt

SEQ ID NO: 751 - DNA, 568 bp, Rattus norvegicus
  Genbank Accession No. AI237108
cccaggcagagtgaagaggaagaatgccaagaaaggccagggtggtgctggagctaaagctttgctgtcatggtcaggagagaggcttggcttcctcattttctgttttgccttgctgggaagcttgagtcagatgggaagataagcggatatgccgtgtgaactctgaggaaataagagctgcttgaaactgaaaaaaggaactgtcaaaataaggacagctgttttgctccttctgtattttagtcctttcttgaggagtcaggtcagttaaagtactgtgaagctggcacagtctccaggcaatggcaagtgatccctatctagaggtttggctgatggtaattccttccatggttaagtcacattgatgggctacatgaggatgtgatttgggtagatcaggaagcagtcaccttccaaaacaagctgtcattaaagtaatctccaggcagcctagggtttatcagggctgagagttcatggtaacattctgcattctgttttagggctttgacccttgacccgaaaaaatggaaaacaccttactgatagagactggatagca

SEQ ID NO: 752 - DNA, 555 bp, Rattus norvegicus
  Genbank Accession No. AI237388
acacgcatccattctaggcagctttgcctaccctaatgccacagtggccaggtgccagacctgaaaggaagcacccagggggcaaggtctaaaagacacaagggacagccctttctcaccctcaccacgaggaccagcacacatttggtttcacctgagacaggacaggaagaggcctcagccacatggctgagtgcacgtacaaagggcttgagtcgtaagtgtcctgatccctcgacccttccacatttggctatttttggtttcattattaaaaaaataaagtgacaattactggcagggaccagttcttgcactgtcttctgttaaaaatatggtaggggtatgggtagccttctcgttggccaatctacttcacaagatatccgcccgcttgtcccttgcacgactcccggccttggtccgggctttgaaggccgcagcattgtacaggtgcttttcaaaacgtgaaatcttgcaggccttcagggcagcagcatccagcaccagcacagggcccatgccgaatatgtcaacggagaaattcattattct

SEQ ID NO: 753 - DNA, 472 bp, Rattus norvegicus
  Genbank Accession No. AI237535
aaggcaaggtctctgtcattagggctgggagagatggtacagatcaagccaaacagtgaaaaataaggcaaactgtagcttcgggttttgagcctggcaccaggaaggcctcttcttgaggaagagggggcaggcagtggcaaatcagcagacgagatgcaaatggagtaacaatcacagttagtggggtaacgagatcaggcggtaaacccttaaagcaacacccaaggtccacgtctttgcatgtgcagggcacaactccagcagcagtttctgggtttgggggtttgttacttttccgactttccccaccccctaaaagacacgaagacgagctcatgaagagatcaaggaagggacgtcttctggctgcgctgggcaagggttgggtgacttccgggagcacttgtctaccttccctgtggctggccgagtcctacaaacgtttgtaggtgcccaggagcgctttgca

SEQ ID NO: 754 - DNA, 620 bp, Rattus norvegicus
  Genbank Accession No. AI237645
aagtcaggtaaggaatcttcacattgttaaacaccagctgtatacatctataagggcatgtcagcaaagatggctgagtataggttagcaagtcccaaagatattcaaaagctaacacagtaaaggtcatgcgaattctagcagtgaatcatgataaaggcgcgctctattcttatgttcaagatatacattttacccgataataaccttatgagtaacagaagctgttattcagacacacattttacccaagactaaaccttagcaactcactgcattgattagcaaaggttattttagagactgatatggcaaaacgcacgccctttattcatggctgaaaatcccactatgcatggtgatacttgtgaagactgaaaataatctggtggatgtaacttgggtgagtggtgccaagaaccctgagagcctagtgatgttctcaggtggcagctttgagctgccccatgacaaaactgactagatgcggaatgctgggtaactagtctttgttaatttgatcttgctcattatttacataatttatagccaccatagtgatgggcaggtacataaagatccttttgcaagctttgtttcccaacacccgttattctcta

SEQ ID NO: 755 - DNA, 589 bp, Rattus norvegicus
  Genbank Accession No. AI237646
aaaaatataaaatttattcatagtcactttcacacagggttactctcgagctagcatcctcaagagctcacagcagtaatagatcgctatcaaatatagctcatgctattggacttggagaacgctcgtttcccctttaaaaatgttaaggctcagtttccaaaaggtagttattaccatttagttttctgctgccaaggctggggagtttggggctaaacggcttacagtgaggttgcgggtagggcggcaggaggcaagctccacatagctcactctcgcatcgtgcagagagtgccgttctttttcttaaaggttccttcccttggaaaaagtcattttgttacaaagacaaacaaaacaagcaaaagtaacaatcataaggcaaaagaaatctttagcacacaaacaaggaaagctaacagtgctttttccattgcgtctggatgaaatgtgttgtgggaacaaacgccgctcctcgcggttcttaaatgaatctgaccaatcagcaccacttcccgcggttcttaaatgaatctgaccaatcagcaccacttcccgcggttcttaaatgaacctgaccaatcag

SEQ ID NO: 756 - DNA, 528 bp, Rattus norvegicus
  Genbank Accession No. AI237835
gcccagccctatctaaacataaaataaaactacaggactgaaattaacaacccattaaaatcggcaataagttatgaaaatcataaagcttttttttttaagtaattaagggtagttaaattatttaaagaatacaaagtccgaacagcttggggtaaggtatccagaaaggcttcccggagcaaagcagtggcccagagggaaaccttcgagtttgaaaggagggagcacatgacatggagtgcgggctggaagtctcacccagaagataacatttctgcaggtatttgtgagagcaacagtagcacctgcacagtgggattgtggggaggaaactgcctgtagaaaatgcagatctttacattaaatgagacaagtgcggaacataactatgttaactaggatagtgtgcctaccacgggtatcagacggttaaaagctggtaaaagggaatggtcctaaagaaaacaaaaacagcattgccttcgtctacccagcccagacctcatccgtcctgcgcactgaaaa

SEQ ID NO: 757 - DNA, 584 bp, Rattus norvegicus
  Genbank Accession No. AI638960
ttgactcagaagcagacgtttatttacttaaaacatttcacaattatattgacaattatttatttaaaataatattctaaatacttacaaaaataaatcaagtattgcttctagttttcaagtgtgacagcatttgccatagaaaatagaagggaccttttgaataaactaaacgctacactgaaacttcctcaagtttaataactacacactatttcctctgatgacttgtgctttataaatgtccaaactatttctgtgcaacaaacaggatcacagtaagactgaatgtataacaagccatatacattcatttttacacaaaatgtcagtactctggcccaaaccaccatcatccccaaaatgccagatacaccattatacagaagtacatgtggttgtgaagtttttaacatccagtcatcaaagaccagatatttattattaaagtatactcagctaaaggttgctaggcaagacattttttacttacattaaatcattagtcaaatcattaaaaaaatagaataaacttcaaatatgtctcaatacattaagttaatcccaagataaacatcagtgtc

SEQ ID NO: 758 - DNA, 463 bp, Rattus norvegicus
  Genbank Accession No. AI638982
ttaaactaaccacctcattttattgaatttttcatggccaagaaacaagggaaaggaagacccagggccaggagcactcattctcttctaggccatgttccagtttcttagcttccatccactaacttctactacaccttctcatagctcttgctggtagtaacacatgctgtgcccacgtcctcaacatttaggagaaagtgtacatttgagtgatagaaagcaaatgtcattctagctcatgctaggtaccctgaactcacatatatatcctgctcataccacaggctgctcctgctgatctcagcttagcagtgctgacatctgcaactaaagtgaaagggtaagtgctgagaatttgtgacccgaaacgtgtttgcctttccgtcttccgagccatcgtgcaacatgctgtgttctccatattgcctggttactgggagtaaaaggatgcccaagacat

SEQ ID NO: 759 - DNA, 426 bp, Rattus norvegicus
  Genbank Accession No. AI638989
ttctctcaagacttggtagttcaggggaagatccatccccagtggctcttcgcttctttctaatactggggccatcgttttgctcagtaccagaggtacaactgctgtcagtggctgcatcagctaagctggagactgcatgacctgaagatgatgcagttgatgaaagtgggtttccttctccagtgctctcctgggtgtggtgctctgatagtggggtagtcctctcctggctatgcaggtctctggctgaatgcatgaaaggcattatgtgatcagatggtaactgtgcgctatgtcgccgctgggtaggaccggtgccaaccctttcacctgttctgacagagggagacagaggtgccacttccggttcaagatacatggctgccttctgagatgcagtactaggtgaaggactctgctggg

SEQ ID NO: 760 - DNA, 498 bp, Rattus norvegicus
  Genbank Accession No. AI639012
ttcttttacaaaaaaaaatataataacttagtttgcattttacaacatttccaatgggtcagggcatccttgaatgggacctaaggggtcagagcagcatgtacctcccttcccagttcaagcaccaggcggggctcatgccaccagtctgcaatctctatcgggatttgatagagcaactgagccatggctcatctgaaggacagcagtacggtgtcaccctgcaagtcactccatatttatttcacaagggtttatgcccctttcttctgctttcctgtacatcttttgaaagtcactaaagcgtggggcacatccaagttgtgcctccccaaagtgcacatgtccagtgaagaggaattctccatgccctggtcgtactccacactgcaacagtgttgtgacatggcccagccagtggccactgtcctcaggagctggctggaaaaccctgctcttctgcctgtggagcctgctcacccgtaggtgaatgactga

SEQ ID NO: 761 - DNA, 278 bp, Rattus norvegicus
  Genbank Accession No. AI639058
ttgcaagctttctgagcttctgcattcagaccacacagaacatgtaaatatttatacacagaccggagaactagcacacgccttacagcctgtgtgtcccctgccttcctctctcttctctcttaagaagtgcggagtgtttttttttcttttttgcggatttgcctagaggtgccccaggcccccgctcctagagagggtgacctttctgtttctccttctccttgttctccagaggggcaatgtgagggtgatggagccgggtcccttctggtgcc

SEQ ID NO: 762 - DNA, 442 bp, Rattus norvegicus
  Genbank Accession No. AI639082
ttcacagaacaattgctttattttcacgagtaaaagcagtggctggaaacaggaaaaagcaattcccgcagtcacatgtatgacaaatgcagcaggcttttcctacacatgaaataaaaagtctttcagaaaacatgattgggatccaacttcaacaggacaagcacaaagtgcccacgcatgtgccagcatgaaatccacggccatgaactcagctgtctcttctcaactgtccccaagcatcgctccagaaacggtctcagtgctgcccaggtcccggctaaggtaggccacccccggttcctggccgtaagtcaccttctatatctcaatcttcaagcaagtagttcgggttgactaccaggtaaggatcttcctcatagctctcgcttccttcactggagcctttcagtccagcctgggtgagctcaatcagaacgtg

SEQ ID NO: 763 - DNA, 567 bp, Rattus norvegicus
  Genbank Accession No. AI639154
ttaagatgttaattgtgctcagggaagccagaagagtggggtttcttagaactgcagtgacaggagttgtgggcacaccgacatgggcactgggaatcaagcttgggtcctattctaaagatatatgtgcttataatctatctctaagtgccaagctctggtgggaatggagtagcatgattcctgcccctgggacagggccctggtgtgagcctcccggagttgctcagcccagtgtggcaagtatccagtgtctgtcgtctgtgggtgtaaggcttgcttgagtaataatgtatatcttttcacatcccttcagggaatgccccctctctgaatgttaatgactccatgataatctgaggcagcctgagtccaggaggcaaaggcgtggctaatgtctcagtaaaatggtaaacctgggatcttcaagacagcccttaaggctgtggaaaagaactctaaatacatgagttcaaaaatatttaattccaggggttggggatttagctcagtggtagacctaggaagcgcaaggccctggggtcgggccccagctcaaaaaaaaaa

SEQ ID NO: 764 - DNA, 548 bp, Rattus norvegicus
  Genbank Accession No. AI639157
ttagtggtactgactgtgtattaagtccttcctccccaggcaggtccatctgtcacctgagaagatgtgggctgacactagatccagtttcttggctgtcagtgtctctccagggccttgaccagaaggtcattcaggcggcctaccatggcccggggatcatcaacgagtcctgctgctatcatggcgttctcatagatctgatccactagcagctgggctagctccggctcacgctccctcagctggttgagtttctttattagtgtgtgcctggggttgatctccagtgtgggctgtagcaactgagcacgctcctcctgggtcttggccagctgctgcatgcgcaggaaatgtcgagcagcccccatctctagcacggtcaccatggcagggtgggtgtccaggcggaaagtcaccttcacattggtgacacgggaccccagtgcatttctcatccatgccattagctcttctgtttctttctcagagaggcgctcaccagctggagatgtgtcctcaaacttttcctccttgtagtgatcaac

SEQ ID NO: 765 - DNA, 595 bp, Rattus norvegicus
  Genbank Accession No. AI639162
ttgcacaaattattttcaattttatttaaatgaaataatgttctaatattatgaaaaactgtcatagaaatgacacaacttttattggaatagaaatttaaagacaaagttatagtatctattttatcctccattaattaaatgcaaaagctatgcatgtcaaattgctacacacatgttggcattatacaatgtactcagtatacttctttattataaataactgaaaacaatatcttatttttcaaacccacataacaaaactgcaaataccacactttttttcctcctcgtttcactttattttttgtaatatggatggaaaaacagtttaccttacccaagattagttttaaaacatctgtgggcgcaaaaacagcaacaaccacagtcacaaaaatactaattttctttcacctaaatgaaaaggaagattttacagggctcagcttaagagagttgtgacggagttactaacagtagaaaaactttgtaacgcctggacaaaacactcataaggcaaaatggtcttttttgcagatataagtataagaaagatgtgatggtaaacagtacaaacctttttctaaaacca

SEQ ID NO: 766 - DNA, 432 bp, Rattus norvegicus
  Genbank Accession No. AI639209
ttgtacttagaagaaaaaaatcaaatagtaaccatacacttgaggaataaaatgttacacaaaaagactttcctcagtcttatttgtgagaggaaaatggaaacaattgtcctgtcaaatgatgacacattaaggtaaaacattgtagcatttttgtaaagaagaattcaatctggtaaaaggtgagaggcttgacaaccatacatttgtgccttggtttttgagaaggatttgctatagtctaggctggacagacaactcaatcctggatcactggagttatgaagtttgtgcctctgtgtttttctggtgctgagactcacatatgctctacacaaagctttacttcgataacattagttttaaaggctagaacatgaacaacataaatgctatgtttcccaacatttaaggaatatataaaaattactt

SEQ ID NO: 767 - DNA, 528 bp, Rattus norvegicus
  Genbank Accession No. AI639285
ttcctatcttctcattgattcgtgaatttctattaaagataaatatcattaacaaatcacaaacacgtacacccgctcccaaaacacagtatagtcccctgtagaacctcctccacatacaggcaagtgacaattccaaactccagtgacatagacattgaattttttatcctttaggaaaacaaatttgaccacaaagtgtccacagcttcggatgagtcgtttgcagtcatggaaggcattttttttaatgtgaaatgaatcagctctcctcctctgatagttccctgaagcagcttctgggctcccctctgtgtgggacagaggggtggtactggatgacatccagggcagggtaatgtgagaagggtccaatccagtgtgcgcatcaccctgagcatctggtttagcttcatttctgttaccatgacaaagtcaacttgtgggagagagggtttatttggctcacaagtccaggttgtggtgtgctattgcaggcctttcaaggcaggaacatgaagttgatgg

SEQ ID NO: 768 - DNA, 468 bp, Rattus norvegicus
  Genbank Accession No. AI639387
  misc_feature (1)..(468): n = a or c or g or t
ttgataaaaccatgtttattactctgctctgtgttccacacaggtttacaagacaaccgagtgtgaatgacaaacattttgttcttcgaaactctgcagtgggactgtgaacaccagccccaccgcaccctgacaatcacacagtgagggtgaaatatcagcaggggtgacagagcaggtctcggccagcagtccccatctgcagcaaaatggtcacgggctaaagcatcctagacaaacctatcagcacccatggtgcacttagaattgaacatagccacatctggtgaatcttctcacttcttccttctctttgntgaatacagtttttcttcaagagggactgggactatgccgtcacactcttttacttcctgggtcaagaggtgtttcacaatatttggtctaaccacatcagtgtctcgtgccaagtgttccagcatgctttccacaagcattgttggggca

SEQ ID NO: 769 - DNA, 281 bp, Rattus norvegicus
  Genbank Accession No. AI639476
ttctggaaaaacttcagtttaataaacagaactaaatgggaactcactctgcactggacacggcaccaggcatgagtgtttgagcagagggcgtaggtcttcagtcatcaggcaaagaaaatgggccacagtgggtggcacacacagggggtggcacacacaattcctaggaacaagtgttgcagactccccacgtttagggaacataaaacagtcaaaatgtcaattccaaatacataatagaaaaactcataggctctttggacaaaacccatcaagcg

SEQ ID NO: 770 - DNA, 446 bp, Rattus norvegicus
  Genbank Accession No. AI639479
ttatttctgaagagaaaattttatatttcagagtatcatcaaaattattttccttttctttgcatccattagctggagcttcagctgaatgtgagttgctgagccgtccagattgatctgaaacaatatgtccatccagcagcatctaggctacatcatcagcatcactgtccacacacagggatggcaggtagaaatcataactagctccccatgttaatattcctctgaaaatggatattctgggtgaccagcaagaaactctgctgaaagatatcgaaaatttttgttcaggccatctagtgtttttatgtcctcaggagacaactgaaagtcaaaaacctgcaaattctctctcatctcattttctttgaaactgggcgaggggcaccaccccacgctgaaccaggtattgaagggcaatcaaggcaaggcttcgcttgttc

SEQ ID NO: 771 - DNA, 401 bp, Rattus norvegicus
  Genbank Accession No. AI639488
ttagactaagacaatgctccggctttaatgtatgaaaataatacccatgttgtctaatttgggggtcatacattagaagtgtaaaggtctgcgtctgcccgccgtctagttgaagtacgtgagcacaatcatttggatcggctgtctgcacacggggcagggcttattcctcttctttagcttctttgcacacgtgaaacatgacatcaggtgtccggttttgccgtgaacaatgcaaccatttttaggccgcccctggcaaatcacacatggctcgatggcgttcagagagaagctggattccatactttcctctttgtcttgtgtgtcctccttcaactctttgccactttcttggctgctgtaaacaatgctactggaagtcgacggctgggaatagt

SEQ ID NO: 772 - DNA, 543 bp, Rattus norvegicus
  Genbank Accession No. AI639504
ttagagagcatcagccgttctatttcttgcatgatcattggcatgaaggaaaagtccaaaacaggggctttgcattctggggattgcgggccaagtgttataagctcctcatagcactttgcctgggttcatgagacctcggggatccagtgtgtctttgagttgcctcatggtctccacacccacaggacccacttcctcttgaagcagctgcctcttgcccagaccgatgccatgttctccagtacatgtcccatggagtgccagggcacgcctgcccagattttctgcaaaggccttgaccctcctctgctcctccacatcatctgggttgaccaacaggatgcagtgaaagttgccgtcacccacatgcccaacaatgactcctgtgagttttgaggccttaagctcctccttggtctctaccaagatctctggcaaccgggagatgggcacacacacgtccgtggaataggccttacttcctggacgcagggccaaagctgcataccaagcattgtgccgtgcagcccaaagttcatt

SEQ ID NO: 773 - DNA, 402 bp, Rattus norvegicus
  Genbank Accession No. AI639535
ttaagaatataaaatattaatctttaataaaatctgttttctacaaaattatgattctcaaggcatcaatggcagggtttctgtacaggagggctgcagtcgtgggtcacgatgagtctctcacttcttcctgttttttccccccgtaggtacctcattcttcttgcccagaatcttcaggagtgccttgggcatgtagtatggccgctcttgggaaccgtcattcctctccaggtcctcaaggaagcagaggaagagcgtgtctacacacattccaaaaacgctgaagaagccactggcaatgacataggctcccatgatggaggtcatgatgggcagccagtaatagttgaggtcggggttcttaaagtctttccccagtcccttgataccaccggagaa

SEQ ID NO: 774 - DNA, 2597 bp, Rattus norvegicus
  Genbank Accession No. AJ000556
cattctccaaagaagcagaaaaatggctatgagaagaaaagggttccagaagcaaccccactccttgatgccagttcactggagtatctgtttgcgcagggacagtatgatttgatcaaatgcctggctcccattcgggaccccaagacagagcaagatggacatgatattgagaatgagtgcctgggcatggctgtcctggccatctcacactatgccatgatgaagaagatgcagttgccagagcttcccaaagacatcagctacaagcgatatattccagaaacattgaataaatccatcagacagaggaatcttcttaccaggatgcgaataaataatgttttcaaggatttcttgaaggaatttaacaacaagaccatctgtgacagcagtgtgtctacacacgacctgaaggtgaagtacctggctaccttggaaaccttaaccaagcattatggagccgagatatttgagacttctatgctcctgatttcatcagaaaatgagccgagtcggtgccattccaacgacagtggcaatgttctctatgaagtcatggtaacaggaaatctcgggatccagtggcggcagaaaccaaatgttcttcctgttgaaaaggaaaaaaataaactgaagcggaaaaaactggactatattaaacacaagaaggaggatgccagaaacaaactccgggaagagtggaacagtttttcctatttccccgagattacccacattgttatcaaggagtctgtggtcagcattaacaaacaggacaacaagaacatggaactaaagctctcttctcatgagggagccttgtccttcgtgtccctggtagatggctacttccggctcactgcagatgctcaccattacctctgtactgatgtggctcccccgctgattgtccacaacatacagaatggctgtcacggtccaatctgcacagatattgcattcaataagctgcggcaggaggggagtgaggaggggatgtacgtgctgaggtggagctgcaccgactttgacaacattcttattgctgtcagctgcttcgaaaagtccgaggtattgggtaatcagaagcagttcaagaactttcagattgaggtgcagaagggccgctacagcctgcatggctctgttgaccactttcccagcctgagagacctcatgaaccacctcaagaagcagatcctgcgcacggacaatataagctttgtgctgaaacgctgctgtcagtctaagcctcgagaaatctccaacctactagtagccactaagaaagcccaggagtggcagcctgtctactctatgagccagctgagtttcgatcggatccttaagaaagatattatccaaggtgagcaccttggcagaggcacaagaacacatatctattctgggaccctgctggattacaaggacgatgaaggaattgctgaagaaaagaagataaaagtgattctcaaagtcctagaccctagccaccgggacatttcactggccttctttgaggcagccagcatgatgagacaggtttcccacaaacacatcgtgtacctctacggcgtctgtgtccgagatgtagaaaatatcatggtggaagagtttgtggagggggggccattggatctcttcatgcaccggaaaagtgatgcacttactaccccttggaagtttaaagttgccaaacagctggccagcgccctgagttacttggaagataaagacctcgttcatggaaatgtgtgcactaaaaacctcctcctggcccgtgagggcattgacagtgacattggcccgttcatcaagcttagtgaccttggcatcccagtctctgtgctgaccaggcaagagtgcatagagcgaaatccctggatcgctcctgagtgtgttgaagactccaagaacctgagtgtggctgctgacaagtggagctttggaaccacactctgggaaatccgctacgatggcgagatcccactcaaggacaagaccctcattgagaaagagaggttttatgaaagccgctgcaggccagtgacaccatcttgcaaggagctagctgacctcatgactcgctgcatgaactatgatcccaaccagagacctttcttccgagccatcatgagggacattaacaagctggaggagcagaatccagacattgtttcagaaaagcacccaataacagaggtggatcccactcattttgaaaagcgtttcctaaagaggattcgtgacttgggagagggtcactttgggaaggttgagctctgcagatatgatcctgagggagacaacacaggggaacaggtagctgtcaagtccctgaagcctgagagtggaggtaaccacatagctgatctgaagaaggagatagagatcttacggaacctctaccacgagaacattgtgaagtataaaggaatctgcatggaagacggggggaatggtatcaagctcatcatggagtttctgccttcgggaagcctaaaggaatatctgccaaagaataagaacaaaatcaacctcaaacagcagctaaaatatgccatccagatttgtaaggggatggactatctggg

SEQ ID NO: 775 - DNA, 1524 bp, Rattus norvegicus
  Genbank Accession No. AJ001044
aagcttggtaccgagctcggatccactagtaacggccgccagtgtggtggaattccagcgcgactgtccctggagccgtcccgcgcctcagacccgcgagtccccgccgctccgcgcgcagtatggcgccccccaaggccctcgcgttcgggctcctgctcgcggtggtcacggcgacgctggccgcagctcagaaagactgtgtctgtaacaactacaagctgacgtcacggtgctatgagaatgagaatggtgaatgccagtgtacttcctatgggacacaaaatactgtcatttgctccaaactggcatccaagtgcttggtgatgaaggcggagatgactcacagcaagtctgggaggaggatgaaacccgagggggcgatccagaacaacgacggtctgtatgatcccgagtgtgacgagcaagggctcttcaaagccaagcagtgcaacggcaccgccacgtgctggtgcgtgaacaccgcgggtgtccggagaaccgacaaggacacggagatcacgtgctccgagagagtgaggacctactggatcatcattgagctcaaacacaaagaaagagcacagccttataacttcgagagtttgcatactgcacttcaggacacatttgcatctcgatacatgctgaatccgaaatttatcaaaagtattatgtatgagaataatgttatcactattgatttgatgcaaaactcttctcagaagactcaagatgatgtggacatagctgatgtggcttactattttgagaaagatgtaaagggggagtccttgttccattcatctaagagcatggacctgagggtgaacggggagctcctcgatctggaccccgggcagactctgatttactacgtcgatgaaaaggccccggagttttccatgcagggcctcacggctgggatcatcgccgtcattgtcgtggtggtgttagcagtcattgcggggattgttgtcctggttatatctacaaggaagagatcagcaaaatatgagaaggctgagataaaggagatgggtgagatacacagagagctcaatgcctaaccaaccatgccgtgtgctgcactgaggagggagccaccggacggaaatggcgaagaactcaggttgcaaacggatagacctggggaggatggagacctttcgagggtcactgctttgttagctaagctcacacatttgtaacagtgaaatttgtactcataaatacaagcagcttgacattggcattaacaatcttaaaattagacgagtgtcttacacatgcaggtctggcgtggaactcagaacttagcctgccaagataggagagcttatgcttattgttgaagtgtgtgtgtgtgtgtgtgtgtgtgtgtgtgtgtgtcataaacagcccacagtagaatacgatgactactctcatttttgtgattaaagctgcccttctacacactgagtcttgtacataataaacgtttttaatgaaataaaacatttttaaactgaaaaaaaaaaa

SEQ ID NO: 776 - DNA, 1214 bp, Rattus norvegicus
  Genbank Accession No. AJ001290
aagtattaaaaagctggacacttctgtcattcggacatttttactcacaagttcccagaatgagggctgcgctggagacagcagacattgccatagtggccctgtattttgtcctggtcgtgtgcattggtttctttgccatgtggaaatctaatagaagcactgtgagtggatacttcctggccgggcgctctatgacctgggtggccattggtgcctctctgtttgtgagcaatattgggagtgaacacttcattgggctggtagggactggagctgcaagtggatttgcagtgggcgcatgggagttcaatgccttgctgctcttgcaacttctgggatgggttttcatccctatttacatccgctcaggggtgtacaccatgcctgaatatttgtccaagaggttcggtggccataggattcaggtctattttgcggccttgtccctgctcctctatatcttcaccaagctctcggtggatctgtactcaggggccctctttatccaggagtccttgggttggaacctttatgtgtctgtcatcctgctcattggcatgactgctctgctgaccgtcactggaggccttgttgcagtgatctacacagacactctccaggctctgctcatgatcattggggcactgacacttatggttattagcatgatgaaggttggagggtttgaggaagttaagagaaggtacatgttggcctcacccaatgttgcttccattttgttgacacacaacctttccaacacaaattcttgtatggtgcatcctaagcaagatgccctaaagatgttgagagatccaacagatgaagacgtcccatggcctggattcattcttgggcagaccccagcctcggtatggtactggtgtgctgaccaggtcatcgtgcagagggttctagcagccaaaaacattgctcatgccaaaggttctactctgatggctggcttcttgaagctcctaccaatgtttatcatagtcgtacccggaatgatttccaggatactgtttgttgatgatatagcttgcatcaacccagaacactgcatgcaagtgtgtggaagcagagctgggtgctccaatattgcttacccacgcctggtgatggagttggttcccgtgggccttcggggcctgatgatggcagtgatgattgcagctctgatgagcgacttggcctccatcttcaacagt

SEQ ID NO: 777 - DNA, 754 bp, Rattus norvegicus
  Genbank Accession No. AJ011811
gctgatagcgagcactgctatcccacagtggcagatgagctcctatgcaggcgacaacatcatcacagcccaggccatgtacaaggggctctggatggagtgcgtcacgcagagtaccggcatgatgagctgcaaaatgtacgactcggtgcttgccctgccagcggccacgcaggccactcgagccttaatgattgtgtccttggtgttgggcttcttggccatgtttgtcgccacgatgggcatgaaatgcacacgctgtgggggagatgacaaagtgaagaaggcccgcatagctatgactggaggcattattttcatcgtggcaggtcttgctgctttggtagcatgctcctggattggtcatcagattgtcacagacttttataaccccttgacgcccatgaatattaagtacgagtttggtcctgccatctttatcggctgggcagggtctgctctggtccttctgggaggggccctgctctcttgctcctgccccggcagtgaaagcaaagctgcataccgtgcaccccgctcctaccctaagtccaactcctctaaggaatacgtgtgagctggggaccccagcctgtgggcaaggtgtgaggcaaaggcctcctggtcactccaccgccaaacaccatgtatagttccctgtgggaggggggggagggccgaggggggtgggtgggagaggaagacaaaacatggggagggtgtgcttttgtacagtaataaaattaagttttgg

SEQ ID NO: 778 - DNA, 3751 bp, Rattus norvegicus
  Genbank Accession No. D14014
agaaagagagctacagactccgcgcgctccggaagaccgggtcgtagagctcgagacaactcccgccagcagcaagacacgggagacccaaccaggatgacaaccctccccaggccgcccgctccatggaacaccagctcctgtgctgcgaagtggagaccatccgccgcgcgtaccctgacaccaatctcctcaaccgaccgggtctgcgagccatgcttaagactgaggagacctgcgcgccctccgtttcttacttcaagtgcgtgcagagggagattgtgccatccatgcggaaaatcgtggccacctggatgctagaggtctgcgaggagcagaagtgcgaagaggaggtcttcccgctggccatgaactacctggaccgtttcttgtctctggagcccctgaagaagagccgcctgcagcttctgggggccacctgcatgttcgtggcctctaagatgaaggagaccattcccctgactgccgagaagttgtgcatctacactgacaactctatccgccccgaggagttgctgcaaatggaactgcttctggtgaacaagctcaaatggaacctggccgccatgactccccacgatttcatcgaacacttcctctccaaaatgccagaggcggatgagaacaagcagatcatccgcaaacatgcacagacctttgtggccctctgtgccacagatgtgaagttcatttccaacccaccctccatggtggctgctgggagtgtggtggccgcgatgcagggcctgaacctgggcagccccaacaacttcctctcctgctaccgcacaacgcactttctttccagagtcatcaagtgtgacccggactgcctccgtgcctgccaggaacagattgaagcccttctggagtcaagcctgcgccaggcccagcagaacatcgatcccaaggccaccgaggaggaaggggaagtggaggaagaagctggtctggcttgcacacccaccgacgtccgagatgtggacatctgagggcccaccgggcaggcgggagtcaccaagtagtggcatccgcgaagagaaaggagccagcccgggtgctcctgacgaggtcccccttggggatgtgttgttaccagaaggggaagttttgttctctttgttggttgtttttccttaatctttctcctttctatctgatttaagcaaaagagaaaaaaatacctgaaagctgtcttaaagagagagagagagatagaattcgcatcaccctgagtatagggagacgggggggtgcctacaaaaatagaattctgtaccccagtaatcaactagttttctattaatgtgcttgtctgttctaagaataggattaacacacaggaagtcttgagaaggatttttgattcttttatgtgtttaagaaaaaaaagcttaagaaacattgctttaaaaaaagaaggaaaaaaaatacagcaaaccattgttaaagtagaagggttttaggtagagaaatgtactctgctttggtgaaaaggcacagatttgggaaggtcctcaacctcactcccctgcttgttcagtgcctacagacctgttacctgatgatacctgtgctttatcccaggagtggggcagacctcttaaccttactgatggtcgattcgacctctagcgggctcgtgggtgtggcaacctccagggctcatgttatgggccctctgccccccacaacctgcaggttcacagagcgccagccagcacgcaggggtagggatgaaatagtgacataatatattctatttttggggaaccttcctgttttgggggttcctgtttagagagatgctggtttttggctggtggccctgcagcccactcaacatcaggttgaacccacagcttttcttttgtgtgtggtttgttttgttatgtttttccttctccatgttcccaaaaccattccatttcaaagcacttttggtcagctagctggaggcagtgttgctgggtgtgtgtgtgtgtgtgtgtgtgtgtgtgtgtgtgtgtgtgtgtcggtgggggagggggtctagtggaatggttggggatgtccacacactcaattctgatggctgcacagcaggtgtgtagggctggtagcatgaggtgcttgggaagttgtgttgggtcgagaagagaaagctctgttctcgtaccaccgggatcttcctgcaaagtcggagggatcttttggtgccagctggcgtttggaagtagggaccgtgatggcattacctggacaaggggattcaggacgactcttaagtctttcacacaggaggcttttaaacactaaaatctctaatttatacgtaaggctacagaagagtatttattgggaaggttgcccatgacccgtgtgactcaaagcaatgtgatcttcccttgattcaaacgcacaccttcttccctgctggcgaaggttttaggccattgtctgagagactggtcttttattggccaagtggggtgtcctccaaaaaaaccaaaccacaaagacggagatgtgggtctccttgactttcccaacccaattgcccccattggagagccatccaaacctgaggaaaattaggggaccccaaaagagtcttgagtctggcacattcttgccgccgctcccaagttagcaacagtaggtaatttgcacacctctggctctgtgcctttctgttcaggatgtgttggtgggaggtggagagcgggtggctggagaggggatgtgagagaagaagtatggagggtagggaccacacgggacagaccgcggctcctttcacagcgctgctaccaatgactcccaggatccccggcgttcggaaccagattcacgttgctttgtatctttcatgttgttttcgctgctattggagggtcagttttattttgttgttgttggtttgtttgtttttttttacaatgtcataaactgccatgttcaagttttaatttcctcgtagaagagtgtatttacagatgccctctccgggactttttctatttattgtgattcaattttggattaatgtgattaccgctgtattcccaacaaaaggtgttttccacacacacacacacacacacacacacacacacacacacacacaggttcctgtacacaatacctcatgtatcacctaacaatacataggcctgccaggcgggtggggcggtctgcctccagggaccctgggaccctgctggggatcatcctgtcatgctgggccttcatttgatctgggacatagcatcacagcagtcaggccaactgtgttctgttagttatcaatattgttacttgtagcggcctgttgtgcatgccaccatgctgctggacccggagagatttgttctgagtctctggtgcatcatataatctgttaggttctagtgttctgtcttgttttgtgttactcacagcattgtgctaatgtaaagccagccgcaatgctgtaggccccaggttccctagcaagctgccaaaccaaaagggtcaccaccagcttagctgaggcgtcccaaccaggcaggacccttgagggctgctgtgtccatggtgatggggtgaagttttggccaaagggccaaaggctggtggatccacacagtctgccctgtgacatgaatggctttgaggggctctggctggtggtcaggttggctttgtgtattctggttgacacaccatggcgcttcccagcacagacatgtgaccagcatggtccagg

SEQ ID NO: 779 - DNA, 1115 bp, Rattus norvegicus
  Genbank Accession No. D16554
ctgtgagggtgtttcgacgcgctgggcggtttgttccttcatcgcattcgttaacaggtcaaaatgcaaatcttcgtgaagaccctgaccggcaagaccatcaccctagaggtggagcccagtgacaccatcgagaacgtgaaggccaagatccaggataaagagggcatcccccctgaccagcagaggctcatctttgccggcaagcagctggaagatggccgcaccctctctgactacaacatccagaaagagtcaaccctgcacctggtcctccgcctgaggggcggcatgcagatcttcgtgaagaccctgaccggcaagaccatcaccctggaggtggagcccagtgacaccatcgagaacgtgaaggccaagatccaggataaagagggcatcccccctgaccagcagaggctcatctttgccggcaagcagctggaagatggccgcaccctctctgattacaacatccagaaagagtcaaccctgcaccttgtcctccgcctgaggggcggcatgcagatcttcgtgaagaccctgaccggcaagaccatcaccctagaggtggagcccagtgacaccatcgagaacgtgaaggccaagatccaggataaagagggcatcccccctgaccagcagaggctcatctttgccggcaagcagctggaagatggccgcaccctctctgattacaacatccagaaggagtcaaccctgcacctggtcctccgcctgaggggcggcatgcagatcttcgtgaagaccctgaccggcaagaccatcaccctggaggtggagcccagtgacaccatcgagaacgtgaaggccaagatccaggataaagagggcatcccccctgaccagcagaggctcatctttgccggcaagcagctggaagatggccgcaccctctctgattacaacatccagaaagagtcaaccctgcacctggtcctccgcctgaggggtggctattaattcttcagtctgcattcccggcgggcactgatggcattactctgcactctagccatttgccccaatttaagtttagaaattacaagtttcagtaatagctgaacctctgttaaaaatgttaataaaggttttgt

SEQ ID NO: 780 - DNA, 2357 bp, Rattus norvegicus
  Genbank Accession No. D26111
ggagctacaaacaaagaagctgtgttggaggagggcctgttggggtttcggcagggcacgctgacagagaaaccatggaggaaatagtggggcttcgagagggctcccccaggaagccagtgcctctgcaagaactctggaggccgtgcccacgaatccgcagaaacatccaggggagcctagagtggctgaaagagcggctgttccgtgtgggtgaggactggtacttcctggtggctctcggggtgctcatggctctgatcagctatgccatgaactttgctattggacgtgtggtcagagcacataagtggctgtacagggagattggggacggccacctgctccggtacctctcttggaccgtgtaccccgtggctcttctgtccttctcctccggcttctcacagagcatcacaccatcctctggagggtctgggatccccgaggtgaaaaccatcttgacaggtgtgatcctggaggactacctagacattaagaacttcggggccaaggtggtgggcctctcctgcaccctggcaacaggcagtaccatcttcctgggaaaactgggcccctttgtgcacctgagcgtgatgatcgctgcttacctgggccgcgtgcgcaccaagaccgtcggggaacctgagaacaagaccaaagaaatggaattgttggctgcaggagcagcagtgggtgtggccacggtcttcgccgccccaatcagtggtgttctgttcagcatcgaggtcatgtcctctcacttctccgtctgggattactggaggggcttcttcgctgccacctgcggggccttcatgtttcacctcctggcggtcttcaacagtgaacaggagaccatcacctccatttacaagaccagcttcccagtggacataccctttgacttaccagagatcttcttttttgtggccttgggggccatctgtggcatcctgagttgcgggtacaactactgccagcggacttccttatttttcctcaagtccaatgggttcacctccaaactgctggctaccagcaagcccttgtactcagctctggctgctgtggtcctggcctccatcacctatccacctggtgtgggtcgcttcatggcttcccggctgtctatgtcagagtacttggagacactgtttgacaacaactcttgggcactgatgaccaagaactcgtccccaccctggtcagcggagcctgatccccagaacctgtggttggaatggtgtcatccacagatgactgtctttgggacactagtcttcttcctggtcatgaagttctggatgctgattttggccaccaccatccccatccccgcaggatactttttgcccatctttgtctacggagctgccatcgggcgcctctttggggaggttctatctttggccttcccagagggcattgtggctggaggcaaggtcagtcccatcatgcccggggcctatgctctggcaggtgctgctgccttctcaggggcggtgacccacaccctctccacagcattgctggcctttgaggtatccggccagatcgttcatgcactgcctgtgctgatggccgtgctggcggccaatgccatctgtcagagctaccagccctctttctacgacggcaccatcattgtcaagaaactgccgtacctgccgtggatccgtggtcgtaagattggttcccaccttgtgactgtgggtcacttcatgaactgtaccctcaccacgctggccaaggacatgcccctggaggaagtgatcaaagttgtgatctccacggatgtgactcagtaccccctggtggagacgacagagtctcaggtcctggtgggcattgtcaaaaggacccacttggtgcagtccctccataccgattcagcttcctgggctccaggccagcagccctgtctccaggatatcttggctaacggctgccccacccagccagtgacacttcagctgtccacggagacctccctgcatgagacgcacaacctctttgagctgctgaaccttcagctgctgttcgtgacgtcacgaggcagagctgtgggctctgtgtcctgggtggagctgaagaaagcaatttcaaccctgaccaatccgcccgctcccaagtgagtcagcctgggagtcggcagcctggcgcccagtcgctctcagctgctgcagggcatctccactttgcagaggagaggactccacattcacctctccccaccctgaaggagctggttgtaaatgaagacaccaatgcgttctgtcacatcggacccttggtccttctagggttgtctgctgctaaccaagacttctgagaaaaataaaactgatttctgg

SEQ ID NO: 781 - DNA, 1500 bp, Rattus norvegicus
  Genbank Accession No. D28557
taaccgcgccaaccgccaccgaggtgcccggagagaggcggagaggcggcatgagcgaggcgggcgaggccaccaccggcggcaccacgcacccgcaggccgcggccgacgcgcccgccgcggcgcccccggaccccgcgcctaagagcccggcggccagcggcgcgccccaggccccggcgcccgccgcgctgctcgcgggagccccggcgagagccagcccccgggcccgccccggcctcatcagcccccgcgggaagcgaggacgcgagaagaaagttctcgccaccaaagtccttggcactgtcaaatggttcaacgtcagaaatggatatggatttataaaccgaaacgacaccaaagaagatgtgtttgtacaccagactgccatcaagaagaataaccacgtcaagtatctgcgcagtgtgggggatggagaaactgtagagtttgatgtggttgaaggagaaaagggtgctgaagcagcaaatgtgactggcccagatggagttcctgtagaagggagtcgctatgctgctgatcggcgccggtacagacgcggctactatggcaggcgccgaggacctccccgtaatgctggtgagattggagagatgaaggatggagtccccgagggagcgcagctccaggttcatcggaatcccacttaccgcccaaggttccgcaggggacctgctcgcccacgacctgcccctgctattggagaggctgaagataaagaaaatcagcaagcggccaatggtccaaaccagccgtctgcccgccgtggattccgacgcccctacaactacaggcgccgcccccgtcccctcaacgctgtttcacaagatggcaaagagaccaaggcaggtgaagcaccaactgagaaccccgctccagccaccgaacagagcagtgccgagtgaccctggctcccaggcaccttcaccaccagcagggtgaccttaagaattaatgaccattcaaaaacaaggcaaaaagcacacccacgaccttaccaacaccaaagaaacatctaagcaataaaacggaagactaacaagatttggacattagaatgtttactgctattctctacgaaactaacaactgcaaagggaaggagcccgcactgtccatcaagctgcgtcccgggaacctgcacaggcagagagcagcctccccatttcagcaacctagtgctttatatttttttcctggtttttactgttttggtaatatgaattaaaagaagaaatattaataccacatggggattgccccaaccaaagaaatctgaaatatatagtaaatgctctttttcctttgttgttcattttggatgctggtgctaaacttccaagtgtcatgatttaagaagaaattttatgcccttatttattcctaggatgaggggagaacatttttgctttcttacatagctctctctgaaatgtgcagtaacaagttcctcaaaaataaaatttttaccttcaaaga

SEQ ID NO: 782 - DNA, 1304 bp, Rattus norvegicus
  Genbank Accession No. D50564
gaattccgtctggcctccttccctcccctgggtaccctcttactgtctgccacctctcggctacctccactgagtgcccaggagtcactgaaactcctggtctctgggatatcaccttaaacaccacctgagttgtctgaggaaggactcttggcaaagcagggtcagagtgactttgctggccctgcaatccgagcgtcccctaggccatggctgccccacagcttttccgagctctggtatctgctcagtgggtggcggaggctctgaaatcccctcgcgcctctcagccgctgaagttactggatgcgtcctggtacctacccaagctgggccgcgatgcgcgacgcgagtttgaggagcgccacatcccgggcgccgccttctttgacatcgatcgttgcagcgaccacacatcgccctacgaccacatgctgcctagtgccacgcatttcgccgactacgcgggcagcttgggcgtgagtgccgctacacacgtcgtgatctacgacggcagcgaccagggcctctattccgctccgagggtctggtggatgttccgcgccttcggccaccactctgtgtcgttgctggacggcggcttccgctattggctgagccagaacctgccaattagctctggcaaaagcccctcggaacctgcggagttctgcgcgcagctcgatccctccttcatcaagacccacgaggatatcctggagaacttggatgcccggcgcttccaggtagtggacgcccgcgcagctggccgtttccaaggcacacagccagaaccccgagatggcatcgaacctggacacatccctggctcagtaaacatcccattcactgaattcctgaccagtgaaggtctggagaagagcccagaggagatccaacgcctgttccaggagaagaaggtggacctgtccaagcccttggtagccacatgcggctccggtgtcacagcctgccacgtggtcctgggggccttcctctgtggcaaacccgatgtgcctgtctacgatggctcctgggtggagtggtacatgcgtgcccaaccggagcacgtcatctctcagggccgggggaagaccctgtgaaggacacagtgcagcttgggtgacaccgaaccatcctagtgccagcctggtcactctgaccctgctttgccaagagtccttcctcagacaactcaggtggtgtttaaggtgatatcccagagaccaggagtttcagtgactcctgggcactcagtggaggtagccgagaggtggcagacagtaagagggctgccggaattc

SEQ ID NO: 783 - DNA, 1397 bp, Rattus norvegicus
  Genbank Accession No. D50695
ggcttggtcactatggaggagataggcattttggtggagaaaattcaggatgagatcccagcactgtccgtgtctcggccgcagaccggcctgtcctttctgggacccgaacctgaggacctggaggacctatacagccgctacaagaagctacagcaagagctggagttcctggaggtgcaggaggagtatatcaaggatgagcagaagaacctgaagaaggagttcctccatgcgcaggaggaggtaaagcgaatccagagcattccgttggtcattggtcagtttttggaagctgtggatcagaacacagccattgtgggctctaccacaggctctaactactatgtgcgcatcctgagtaccattgatcgggagctgctcaaacccaatgcctcagtggccctgcacaagcacagcaacgcactggtggatgtgctgcctcccgaggccgacagcagcatcatgatgctcacctcagaccagaagcccgacgtgatgtacgccgatattggaggcatggacatccagaagcaggaggtgcgggaggctgtggaactaccactgacgcacttcgagctctacaagcagattggcatcgatcctccccgaggtgtcctcatgtatggcccacctggctgtggaaagaccatgttagcgaaggctgtggcacatcacacgacagctgcatttatccgtgtggtgggctcagagtttgttcagaagtacctgggtgagggcccccgaatggtccgggatgtgttccgcctggccaaggagaatgcacctgccatcatcttcatagatgaaattgatgccattgccaccaagagattcgatgcccagacaggagctgacagggaggttcagaggatcctgctggagctactgaatcaaatggatggatttgaccaaaacgtcaatgtgaaggtaatcatggccacaaacagagcagacaccttggatccagctctacttcggccaggacgcctggaccgcaaaattgaattcccactccctgatcgtcgccagaagaggttgattttctccaccatcaccagcaagatgaacctttctgaggaggtcgacctagaagactatgtggcccgcccagataagatttcaggagccgatatcaactccatctgtcaggagagtggaatgttggctgtccgtgagaaccgctacattgtcctggccaaggacttcgagaaagcatacaagaccgtgatcaagaaagatgagcaggaacatgagttttacaagtgacccctccccacactccccaggcacctgtcccaaaggctagttttctctttacccaggattggtttcgtcaataaatggacgtgattggaaaaaaagcggccgcgaattctagaactagtggatccccc

SEQ ID NO: 784 - DNA, 3775 bp, Rattus norvegicus
  Genbank Accession No. D63772
ggtccccagcggcagtggcagctctgacagcggcccgtgcgctgtgtctccaccgtgccctgcatccctcatcccacatccgccgcgctccccgattcctcacaaacgccggtgcccatcatggggaagcccacgagctcgggatgcgactggcgccgcttcctgcggaatcactggctgctgctctccaccgtggccgccgtggtactgggcatcgtggtaggagtcttggttcgaggacacagtgagctctcgaatctggataaattctactttgcgtttcctggagaaattctgatgcggatgctgaagctcgtaattatgccactgattatatccagcatgatcacaggtgtcgctgcactggattccaacgtatctgggaaaattggtctttgtgctgtagtatattatttctccaccaccgtcattgctgtaatcctaggtattgtgttagttgtgagcatcaagcctggtgtcactcagaaagtgaatgaaatcaacaggacaggcaaaacccctgaagtcagcactgtggacgccatgttggatctgatcaggaacatgttccctgagaacctggtccaagcctgttttcagcagtacaaaaccaagcgtgaagaagtgaagcctgccagtgatcctggggggaaccagacagaggtgtctgtcaccacggccatgacaacaatgtctgagaacaagacaaaggaatacaaaatcgtgggcctgtactcagacggcatcaacgtcctgggcctgattatcttctgcctcgtctttggacttgtcattggaaaaatgggagaaaaagggcagattctggtggatttcttcaatgcgttgagtgacgccaccatgaaaatcgttcagatcatcatgtgttacatgccgatcggtattttgttcctaatcgctgggaagatcatagaagttgaagactgggaaatattccgcaagttgggcctttatatggccactgtcctgagtgggcttgcaatccactccctcgtagtgctgccactgatctatttcatagtcgtgcggaagaaccctttccgctttgccttgggcatggcgcaggctctcctgacagctctcatgatctcatctagctcggcaacccttccagttacattccgctgtgcggaagaaaagaaccacgtggacaagaggatcacaagatttgtgctgcccgtcggcgccaccatcaacatggacggcactgcgctctatgaagccgtggcagctgtgttcattgcgcaagtgaacggcatggacctgagcattgggcagatcatcacgatcagcatcacagccaccgctgctagcattggagctgccggtgtgccccaggctggcctggtgaccatggtgatcgtgttgagtgccgtggggctgcctgctgaggacgtcaccctcatcattgccgtcgactggctcctggaccggttcaggaccatggtgaacgttctgggtgatgcgtttgggacgggcatcgtggagaagctgtccaagaaggagctggagcaggtggatgtctcctctgaagtcaacattgtgaacccctttgccttggagcccacaatcctggataatgaagactcagatacgaagaagtcttacgtcaatgggggcttctcggtagacaaatctgacaccatctcgttcactcagacctcgcagttctagatgcctggccttagatgcctgggactgtgaagggcatctccgagggagccatctcttagccaactccagcgttaaggagcgagaaggacacaaagaatcaactgtacatttagtttgataaacagacctccagattattttctatatttggctctatagcctttgttctctgggtttgggaacgtggggtgggatgaaccgaaggaaattaagaaagctgtgttatctggactttctaattctgtaaaacaaagtttagaagtatatgacgtagtaactgttaggattaggtcatgggtctgggagaaaaattgctttctcaagcacagaccaatatttggggtttttaaacaatattattggctacaaatttttactcaggctttctattggcggggcttcctttgccttctcactttttatagattataattcagctcaaaagccccacccagtcaactagtgcccaattttccattttgcctcattccagcactctcaactactagtgccaaattttccattttgacctcatctccagcaactctcaaactacttttgggaaaaaaaaaaaagcaaaaaggatcagcatagtctgcaataacagtttcaagatattgtggggcttaggggaagggaagggttttttattcaatgtactgtattgggacgctggatgtcagtgttcggtatagaactatatgtatatgtgtgtatatttattattttcatgtaattttcaagacagagatcagtaatgaactatcaatgtgaacgagacgttttccttgtacttgaatcagggctctagctccagccttgctgtgcttcagagctcacgaggacgctctcaggcgctctggggtgagaaatcaagttgctgggttactgtggttcaagccctaaagcagaaactctagggtggcccagccatccattgacaacatctaaggtcaagctccctggagggtgggaaacccttgtcgggcatggaataagtacatttacaaagggaccgtagaggcaagatgtgctccgatagcaacagaaggcttcattcttcaagtacacttcaaggcccacttcacaaggctgtcacctttctgcccttggttttctctgaccaccagggccaaaccagcagtggcgagccatcacctaagctgtttcaaaatgggctgcataaattgaataagcttcatcggaaggtgaccaagctattctaatactgtagtctttttattttagcttttgttattttatttttttagttttttgagacagagtttgtctacatagccctggctatcctggaactcactatgtagactagactggcctcaaactcacagagatcctcctgcctctgcctccttagtgctggcctgaaaggcaagtgccaccatgcccagctctatgctgaattcttacagaataaaaaccataaaagccgggccacaagctactgataccagtggttcaggggaaatgcttcagtctgtctctggagaagactgttctgaaaatctcggccttgtggcttagaatcctctgcctgtctttctcctgctaatttctgaagatggactattaaaattctacacttctgtccccatcctgtaaataaaacccaacaaaaactcgttcttaatgtggacggattcagaacagccatgtttctgtagtgcccttaactcatcttaaacccgtgcttttatatttgagaagccagaaatcgtgccaaagataacagaaaggtaaacgagtgttgaccatggccacctgaagctacagcctgaccctcacagtgaccagtgactccgaactttgaagtacaaatatccctattctttataggaagcaaatctaaatctaaatgaggttggatgaatactttatgtaggaatggctggttctgtccccttatcaggtggttcttgtctgtggcactgaattaattggcagagctgtccacgagttcactggggtcatccttgtaaccagctgcttaacacactgtgctgttatctcaagaggacgcgttccatttttctcaataaacatctcccacactttctccctt

SEQ ID NO: 785 - DNA, 438 bp, Rattus norvegicus
  Genbank Accession No. H31813
  misc_feature (1)..(438): n = a or c or g or t
ggcttcaatggattttattagccttctttcatgtactgactgggtataggaggccttccagaggaagaggcctgcaagtnagaggctcaggagaagccaaatcactgacacccagagctggttagggtgggatggacaagatctgagcgattcctcttctggaggagggaacgaacagtgctgctgaggcatgtnacccacccagccagacactcttcacagaacagttctggagggtgtggtgaaggatgtcctgctccatgcagggatgggtgtcannngaggaagggaggagtttatcagaaggcaagaggaagtaacaaactgagaggagcggaggaggaggaaagcagttaagctgccttcgtctgcaagcctccaggatggcacggaagatggctgcagccgcgacttctccaggatctggctgatctagtt

SEQ ID NO: 786 - DNA, 351 bp, Rattus norvegicus
  Genbank Accession No. H33101
  misc_feature (1)..(351): n = a or c or g or t
cggagctggggactgaacccagggccttgtgcttgcnaggcaagcgctctaccactgagctaaatccccaacccctagagcagacactcttaagtggcacagtggtaaccgggctcctagagtgtcagaaccctgacatctttcttttcagagacagagggggccggatggaggggaagcagcctctgctccttaccttactctgcaacactgagaaaccagaaaaaaagacctgggactatattaagactcccaaagtaaaactatatggaagtgtttattttttaaagtctagtaccagagaacaggacagacatgacagttactactcacaaggggcagtgtcccact

SEQ ID NO: 787 - DNA, 312 bp, Rattus norvegicus
  Genbank Accession No. J00797
gggagagattacctcataccatgtcgcttgcaccaatcaccactctcctgtcgcggcttctctgggcagacggaggggtctggaccaacaggaaaggccttggcccatccccatggtgaccggagctgtatataaggggcgcatccggcccaagtgccggcaggttctcttacatcgaccgcttaagagtcgcgctgtaagaagcaacacctcctcctcgcctccgccatccacccggcagccgcgaagcagcaaccatggtgagcaaaccttcccgagttctcaggagcgggtgggtgtcagcccggctca

SEQ ID NO: 788 - DNA, 909 bp, Rattus norvegicus
  Genbank Accession No. J02592
tacagcatgggggatgctcccgactatgacagaagccagtggctgagtgagaagttcaaactgggcctggacttccccaatctgccctacttaattgatgggtcacacaagatcacccagagcaatgccatcctgcgctaccttggccggaagcacaacctttgtggggagacagaggaggagaggattcgtgtggacgttttggagaaccaggctatggacacccgcctacagttggccatggtctgctacagccctgactttgagagaaagaagccagagtacttagagggtctccctgagaagatgaagctttactccgaattcctgggcaagcagccatggtttgcagggaacaagattacgtatgtggattttcttgtttacgatgtccttgatcaacaccgtatatttgaacccaagtgcctggacgccttcccaaacctgaaggacttcgtggctcggtttgagggcctgaagaagatatctgactacatgaagagcggccgcttcctctccaagccaatctttgcaaagatggccttttggaacccaaagtagcaccacaaagtccagacctagggatactcatgagtgccctgctggctgtgggcctagagcatggctctggcgcccaccacatgcagctttctcctcctttccattccctgttcctccatctcctcttcccagcccttgcctcagtcaagcctcagttccctggtctctccatttcttcattagtcccctcccttgtctctgccctgcatccaacccttccctcactgattttcggaggactgtaccagacccctgaatccccagcctggcctgagagattagatctcactgtgctgccctggtccccaggaggacccattttatttgcaataaagtgtgaaccacaaa

SEQ ID NO: 789 - DNA, 1639 bp, Rattus norvegicus
  Genbank Accession No. J02827
tccgcggccaagatctggaggccgagccgtggcctgcgccaggctgccctcttgctgttggggcgacctggggctcggggcttggctagattccaccccagcaggcagcagcaacagcagttcccatccctggatgacaagccccagttcccaggggcctctgcagagtttgtagacaagcttgagttcatccagcccaatgtcatctccggcatccccatctaccgcgtcatggaccgacagggccagatcatcaaccccagtgaagatccccacctgccccaggaggaggtcctgaagttgtacaggagcatgacgctgctcaacaccatggaccgcattctctatgagtcccagcgacagggccggatctccttctacatgaccaactatggcgaggaggggacacatgtggggagtgccgctgccctggagcgaacggacctggtgtttggccagtaccgggaggcaggtgtgctcatgtaccgggactacccgctggagctgttcatggcccagtgctacggcaacgtgagtgacccaggcaagggacgccagatgcccgttcactacggctgcaaggagcgtcacttcgtcaccatttcctctccactggctacgcagatccctcaggcggtaggggcagcctatgctgccaagcgggccaatgccaatcagatcgtgatctgttactttggcgagggggcagccagtgaaggggatgcccacgccggtttcaattttgctgccaccttggagtgtcctatcatcttcttctgccggaacaatggctatgccatctccacaccaacctctgagcagtaccgtggggatggcatagcggctcggggccctgggtatggcatcatgtcaatccgtgtggacggcaacgatgtgtttgcggtgtacaatgccactaaggaggcccgacggcgggctgtggctgagaaccagcccttcctcattgaggccatgacctacaggatcgggcaccacagcaccagtgacgacagctctgcgtaccgttcggtggatgaggtcaattactgggacaagcaggaccacccgatctcgagactgaggcagtacctgctgaaccagggttggtgggatgaggaacaggagaaggcctggcggaagcagtcacgaaagaaggtgatggaggcctttgaacaggctgagcggaagctaaagcccaacccaagcctcctcttctccgatgtgtaccaggagatgcctgcccagctgcgcaggcagcaggagtccctggctcggcacctgcagacctacggggagcactaccccctggaccactttgacaagtgaggccctaaccaccacaaggtgtcctgctctgagtggagctggggggcggcaggacgctgccccccgctgctaaccagtgctgctgacgtgctgagcagccagtgtggcacgcactgcggctcccccaggctacttcactggggcaccacatttgcagccattgctgcagctccatcactcccttcacctgttacagtgccttttaggggtggggaggaaccagggccagggcagaccctttggcagggtggccctggatttgctcagagaaatagctgattggcagagtaagtaaaccacagctctgcctttg

SEQ ID NO: 790 - DNA, 883 bp, Rattus norvegicus
  Genbank Accession No. J03752
gctagctgtcctcctgggattcagtcatttaaagattgagaccaagattgaaagcatggctgacctcaagcagctcatggacaacgaggtgttgatggcctttacctcctatgcaacgatcattcttgccaagatgatgttcctgagctccgcgactgcattccagaggctaaccaacaaggtttttgccaacccggaagactgtgctggcttcggcaagggggagaatgccaagaagttccttcggactgacgagaaggtggaacgcgtgcgaagagcccacctgaatgaccttgaaaacatcgttccctttctcggtatcggcctcctgtactccctgagcggaccggatctctctacagccctcattcacttcagaatctttgtgggcgctcggatctaccacaccattgcttacttgactccccttcctcagccaaacaggggcttggcattttttgttggctacggagttactttgtcaatggcttacaggctgctcaggagcagactgtacttgtaaagagatttgtgaccgtcaccctctgattgatttaaaaaaataaaggattctatatttctagtgtattaaaaaactttctaaggttttatgtatgaaaggagcagagaaatcaggaatcagggaaaattctgtttgaagactaccatccacaggctctacccttttgtacctgggttagacatttaacatgaccggccttagctatgctgtctaactcctaaagtactttgtcctaagtcttgagtgccttataaattgtaacattccttctacatttcctgtggtgcatctataaaagagtgctcacacctgtgtgaagcctgggtttcattggcacctgaattaaaaacattacaaatg

SEQ ID NO: 791 - DNA, 5224 bp, Rattus norvegicus
  Genbank Accession No. J03914
aaggcagggagttgacggtgaagaaggaacaatgccaggaagataatgaacagggttgcactttgcccatcaaaagtctctaactgcacatctggtggaaacagcacaccagagcaagaacagggagctgccgacacaggtgctagcccattcctgtctttgattactgactgcttagactggttcctgagccagtatagatatatttttttccctgtccctggatccatagctccttcccccaacaatccctcccgtggaatgtctgaaatttgaaacactgtaggccaatggtccaatagaaagccataaccaggtcccgcctcctccttgcctaagacattatcaggaagctcagacttgcaagacccaggtttgtctgctctgtacaccctaccagcacgatgcctatgacactgggttactgggacatccgtggggtgagtgagagcctcttctgctgggtgggacatgtgtggggtgaggagtagctaggatgtgatttccaggagacagattgagtgctgaagttgttggaaagttttgcctctcagggcaagttcaaacacaggggggcttgtgcttatgtggcctgtgtgtgagcttgtgtcgtgactgttcagtgtaaggtgtaggctcaccaagagattgcacagtcagactgtcaggcttttccaatctgtgacttgtgatatgtcatcttcccagctggctcacgccattcgcctgttcctggagtatacagacacaagctatgaggacaagaagtacagcatgggggatggtgattacacctgcttctcagacccctgctcccctgaccctggtgctcagcaactctgctctgaccccctgttgctcagctctacacagctcctggagttgggtttagaaactgtcccttctagaaaccttgaattttggagggctgacttttgaaaatcttagtgatatacagaagcattctctgtccttggggtgtgtgaagtaggtgaaattgcagatcttggggtgttctcatgactcactccttggagggatccctagagaaggaagctgggatactggggtgatttcttttgacatcctcttgtccaccacagctcccgactatgacagaagccagtggctgagtgagaagttcaaactgggcctggacttccccaatgtaggtggagggaaggggaggtgtggggaaggcctagtgctctcacctcatctcctggcctggctgaggggttggcatcagtgtttctgcttgcctgtttcatccctgctggctgcacagtgtttctgtgttgggctgtgtcctggctctcccactcagtcgacaccgtgctcatggagggtttcctggggcagcacactgagtgccagggccatgtctatcctcacccagggaagggattcagctaccccataacccatctgaccatccctgattgtctatccagctgccctacttaattgatgggtcacacaagatcacccagagcaatgccatcctgcgctaccttggccggaagcacaacctttgtgagtggggctgactgcagggtggggacagaagccatccctcttggcttggctggagcaggatgctgagagtgggtctgtgttgtgtgtgctgcaggtggggagacagaggaggagaggattcgtgtggacgttttggagaaccaggctatggacacccgcctacagttggccatggtctgctacagccctgactttgtgagttccaccagccctgagttgaagctggccctgcactcttgctcttgtatcagctctagccccgtttgccaccacagcctctcagtgctactcatggtacagtgtttgaaattgccgacagagtaacccccaagctcagtttgccaaatgaaaacttctagtcatttgctctaagatcgtatccagactctccacagcgacatttagtccctgctaggacagacagagtgtgatccctccagttctagctgctggttctgtcctgagctgtgtctttctgttgccctggggtcttgccatgtctgcagccctcatactcacactatgagaagacactggggctagggaacacttcctcccaaatggcttcccagagctgtgtccttgacacccacagagagaagcagatgctcccaataggcaactcagtcagtcaaaggccttggatcctcggctcctgtttcattttgtcctctcaaattcccctcatttctttggaacctgtactgaagtcctcactgccccagtaggcagaacactacctgtttcctgggccgtttcagttgtttgcttctgcctcatgtgaggtcagagttcagagtcaggtgcctacaactgtctcatgcaaggtggttctgataatgatggtggagtccagggaacagagctgtatcttgttgggctgtttccaaagaacagtctaatcatggtgttgctctaactaaacacgtgggcctcaacccagactgaatctcacgaaggtgactgcttctctgcacgctggggcctgtacagccctgtgaggccagcctctgccagggagcctgtgtctgaaggtagtgatggttgttctctgcttcaggagagaaagaagccagagtacttagagggtctccctgagaagatgaagctttactccgaattcctgggcaagcagccatggtttgcagggaacaaggtaaaggcagcgggtggggagaaggatttgccatttcttcccaggtgtcaaattctagcactcacccttggcttcctgcagattacgtatgtggattttcttgtttacgatgtccttgatcaacaccgtatatttgaacccaagtgcctggacgccttcccaaacctgaaggacttcgtggctcggtttgaggtgatgtcctgaccccgcttcctcttgacctacttcccttccccccttccagaatgcctttctactccttgaaatggagatgaaaatggctagcttctgttgagcatagaactgtgttctgctctttcgtcccttgcatggagtttcccagcacaccctgcatgttgtgtaggattatcagctccttaggatcattttggaagcggattgtaaagactcagttcctcagggagtcagtaccattggaaggggacgtggtttttttccagtgtgcttctagcttccaagaacagggggcaatagatctaccggataccaaaggaaaaaagccataggttgcaatagagcctggattttccagccctgaagcctatggaaattcaggacatgcccggaatgtatagggagcactattcaggattgatgcacagtaccaagatacagtatccatatctggcctatacaattctttgctcagtcagacccctgagtggggaagcactgggacccagggctacagttagtgtgagtagacagctcactgctgttggaggattttatcctccaacatcctgtttctttcctttccttttcctccttggtgacatcttgatgtttgactgtagaatcattacagtgagactgtactgccatcgtcatcttctctagtgtggcctccgtgtggcacagttctgagctcagtacgatgtggaaacctgcgtctctgtccaggcatgcagagtggcaggcacgcctgactatgatgtacatgtgatccccacaagccccactttattagagatttgggggatcgaggccatagtccaatgggaatcttagcgtggggtcttctcctctgtccctgctgcacacgtgatgcgtttttccttagttttcattggcttgccttctggtccagcctgctcggctctggagattgtgtgagaactgttgaacagtgtggtgggagagtgtgggaggctgcagtccaaggccagccaagcctggcttcttgggtaaggctgccctggaactttgaattcatcacagtttatctgggcaccgtactggaaagatagcacacagcacagtgccattctgtagaatgttctctagcagggctgagtctaggcaggatggacacactaagtatgcatttagctcccagtgttctgagtgtagatttttctgcatcaggagaatggccaaggccactccattggccttgctgtgtcacctatccctctgctcattcagtcaggatttcctgaggtactgggtgagatctttgctctcttccaaagtacactggcatgttactggtccctttgacctgtttggtcctttcccaatgtggaaacgcagggcaagaaggagcctgcaggtaaaaaagaaaagaaaagaaagcgagaattgcgtaaccgggtagcaacaaggtagcttagggagtgaaccgagggaatcagaatggaggctgctgagcccctccctgtgtagaccgggatgcagactctcgctgttcctgctgagcctgtgtgcctggcttcctcctggcaggagcacagcactgttttgcgggattctgtggagagctccctcttcttctatacctgcaccacagctgcagatggacgcagctgaacgcagtgccagtttcccctacatcagaggacattaaagcatccccttaccagagttgtgcccctgagcaacccgggctgtgttggggttcttagagatgtcccagatcctcaattctcgctttctcctcctcctcccttcagggcctgaagaagatatctgactacatgaagagcggccgcttcctctccaagccaatctttgcaaagatggccttttggaacccaaagtagcaccacaaagtccagacctggggatactcatgagtgccctgctggctgtgggcctagagcatggctctggcgcccaccacatgcagctttctcctcctttccattccctgttcctccatctcctcttcccagcccttgcctcagtcaagcctcagttccctggtctctccatttcttcattagtcccctcccttgtctctgccctgcatccaacccttccctcactgattttcggaggactgtaccagacccctgaatccccagcctggcctgagagattagatctcactgtgctgccctggtccccaggaaggacccatttgatttgcaataaagtgtgaaccacatttgtccagtgtcctgttttgctgtctgtgacactcagggctgactgtgttgacttggttgattttgttttgttgctcgcaggaggagctagagggatggactctgggctatttga

SEQ ID NO: 792 - DNA, 2178 bp, Rattus norvegicus
  Genbank Accession No. J05181
cagagcggagctgcggccaggaggaggacgcggccatggggctgctgtcccaaggctcgccactgagctgggaagagacccagcgccacgccgaccacgtgcggagacacggcatcctccagttcctgcacatctaccacgcagtcaaggaccggcacaaggacgtgctcaagtggggtgacgaggtggagtacatgttggtgtcctttgatcatgaaaataggaaagtccagttgttactgaatggcggcgatgttcttgaaactctgcaagagaagggggagaggacaaaccccaaccacccaaccctctggagaccagagtatgggagttacatgattgaagggacacctggccagccgtacggaggaacgatgtccgagttcaacacagtggaggacaacatgaggaaacgccggaaggaggctacttctgtattaggagaacatcaggctctttgcacgataacttcatttcccaggctaggctgccctggattcacactgccagagcacagacccaacccagaggaaggaggtgcatctaagtccctcttctttccagacgaagccataaacaagcacccccgctttggtactctaacaagaaacatccggcatcggagaggagaaaaggttgtcatcaatgtgccaatattcaaggacaagaacacaccatctccgtttgtagaaacatttcctgaggatgaggaggcatcaaaggcctctaagccagaccacatctacatggatgccatgggatttgggatgggcaactgctgtcttcaggtgacattccaagcctgcagtatatctgaggcaagatacctttatgaccagttggccactatctgcccaattgttatggctttgagtgctgcatcgccattttaccgaggctacgtgtcagacattgattgtcgctggggagtgatttctgcatctgtagatgatagaacacgggaggagagaggactggagcccctgaagaacaatcgctttaaaatcagtaagtctcggtatgactcaatagatagctacctgtccaagtgtggagagaagtacaatgacatcgacctgaccatcgacacggagatctacgagcagctcttagaggaaggcatcgatcaccttctggcacagcacgttgctcatctctttattagagacccactgaccctttttgaagagaaaattcatctggatgatgccaacgagtctgaccattttgagaatattcagtccacaaactggcagacaatgaggtttaagcctcctcctccaaactcagatattggatggagagtagagttccgaccaatggaggtacagttgacagactttgagaactctgcctatgtggtatttgtggtactgctgaccagggtgatcctctcatacaaactagacttcctcattccactgtccaaggttgacgagaacatgaaagtggcacaggagcgagatgccgtcttacaggggatgttttatttcaggaaagacatttgcaaaggtggcaacgccgtggtggatgggtgtagcaaggcccagaccagctccgagccatctgcagaggagtacacgctcatgagcatagacaccatcatcaatgggaaggaaggcgtgtttcctggactcatccccattctgaactcctaccttgaaaacatggaagtcgacgtggacacccgatgcagtattctgaactacctgaagctaattaagaagagagcatctggagaactaatgactgttgccaggtggatgagagagtttattgcaaaccatcctgactacaagcaagacagtgtaataactgatgagatcaactatagcctcattttgaaatgcaatcaaattgcaaatgaattgtgtgaatgtccagagttacttggatcaggctttagaaaagcgaagtacagtggaggtaaaagcgacccttcagactagacatccagcaaagtggatggcagctgcagccctgaccccgagcccactcagacgctgtgaagaccaagatggcctacagtgttccagttgcccacaagtgactagaagcttccttcagtaggtgaatctgagtttgtatatgtatatactaaagtatttttatgattattaacaatgtattttaataacactgtatctacagtcatggtgaactggcttgtacattttt

SEQ ID NO: 793 - DNA, 9852 bp, Rattus norvegicus
  Genbank Accession No. J05510
tggggtcacttccttcacacaggactttggcggaaatctctacacccgtgtctcgtcatccccttcgagagcattaactatttaaaaccaggagagaaagcgcacgccgagaggaggtgtgggtgttccgctcccatcctaacggaacgagctccctcttcgcggacatgggattgcccagcggctgctaacccctgtcctggtcctgatccctcaaaccggcgtggctccccggtcaccaaggagctgactacaaaggatttgcatccttggctgggagtccattggctacagagtgcctgacctgggtcaggcttttcaacaaggacatgtctgacaaaatgtctagtttcctacatatcggagacatttgttctctgtatgcagagggatctacgaatggatttatcagcaccttgggcttggttgatgaccgttgcgttgtacagccagaagctggggaccttaacaatccacccaagaaattcagagactgcctctttaagctatgtcctatgaatcgatattctgcacagaagcagttctggaaagctgctaagcccggggccaacagtacaacagatgcggtgctgctcaacaaattgcatcatgctgcagacttggaaaagaagcagaatgagacagaaaacaggaaattgctggggacggtcatccagtatggcaacgtgatccagctcctacatttgaaaagcaataaatacttaactgtgaataagaggcttcctgccctactggagaagaacgccatgagagtgacgttggatgaggctggaaatgaagggtcttggttttacattcagccgttctacaagctccgctccatcggagacagtgtggtcataggtgacaaggtagttttgaaccctgtcaatgctgggcagccgctacatgccagcagccatcagctggtggataacccgggctgcaatgaggtcaactccgtcaactgtaacacaagctggaaaatagtgcttttcatgaaatggagtgataacaaagatgacattctaaaaggaggtgatgtggtaagactcttccatgctgagcaagagaagtttctcacgtgcgatgagcacaggaagaagcagcacgtcttcctgaggacaaccggcagacagtcagccacgtcggccaccagctccaaagccctgtgggaagtggaggtagtccagcatgacccatgtcggggtggagctgggtactggaatagcctcttccggttcaagcacctggctacagggcattacttggcagcagaggtagaccctgactttgaggaagaatgcctggagtttcagccctcagtggaccctgatcaggacgcatctcggagcaggttgagaaatgcccaagaaaaaatggtgtactctctggtctctgtgcctgagggcaacgacatctcctccatctttgagctagaccccacaactctacgtggaggtgacagccttgtcccaaggaactcctatgtccggctcagacacctgtgtacaaacacctgggttcacagcacaaacatccccattgacaaggaagaggaaaaacctgtcatgctgaagattggtacctctcccctgaaggaggacaaggaagcttttgccatagtccccgtttctcctgctgaggttcgggacctggactttgccaatgatgccagcaaggtgctgggctccatcgctgggaagttggaaaagggcaccatcacccagaatgagagaaggtctgtcaccaagctgctggaagacttggtttactttgtcacgggtggaacgaactctggccaagacgtgcttgaagtagtcttctctaagcccaaccgagagcggcagaagctgatgagggaacagaatattctcaagcagatcttcaagcttttgcaggcccccttcacggactgcggggatggcccaatgcttcggctggaggagctgggggaccagcggcacgctcctttcagacacatttgccgactctgctacagggtcctgagacactcacagcaagactacaggaagaaccaggagtacatagccaagcagtttggcttcatgcagaagcagattggctatgatgtgctggccgaagacaccatcactgccctgctccacaacaaccgaaagctcctggaaaagcacatcaccgcagcagagattgacacgtttgtcagcctggtgcgaaagaacagggagcccaggttcttggattacctctctgacctctgtgtatccatgaataagtcaatccctgtgacccaggagctcatttgtaaagctgtgctgaatcccaccaatgctgacatcctgattgagaccaagttggttctttctcgttttgagtttgaaggcgtttccaccggagagaatgctctggaagctggggaagatgaggaagaggtgtggctgttctggagggacagcaacaaagagatccgtagcaagagtgttagggaattggcacaagatgctaaagagggacagaaggaagacagggatgtcctcagctactacaggtatcagctgaacctctttgcaaggatgtgtctggaccgccagtacctggccatcaatgaaatatccgggcagctggatgttgacctcatcctccgctgcatgtccgatgagaacctcccctatgacctcagagcatccttttgccgcctcatgcttcacatgcatgtggaccgagatccccaggagcaggtgacccctgtgaaatacgcccgtctgtggtcagaaattccctccgagatcgccattgacgactatgacagcagtggagcatcgaaggatgaaatcaaggagaggtttgctcagacgatggagtttgtggaggagtacctgagagatgtggtttgtcaaagattccccttttctgataaggagaaaaataagctcacatttgaggttgtgaacttagccaggaacctcatatactttggcttctacaacttttctgaccttctccgattaaccaagatcctcttggcaatcttagactgtgttcatgtgacaaccatcttccccattagcaagatgacgaaaggcgaagagaataaaggcagcaacgtgatgagatctatccatggagttggggagctcatgacccaggtggtgcttcggggaggaggctttttgcccatgactcctatggctgctgcccctgaaggaaatgtgaagcaggcagagccagagaaagaggatatcatggtcatggacaccaagttaaagatcattgaaatactccagtttattttgaatgtgagattggattataggatctcctgcctcctgtgtatatttaagcgggagtttgatgaaagcaattcccagtcatcagaaacatcctccggaaacagcagccaagaagggccaagtaatgtaccaggtgctcttgactttgaacacattgaagagcaagcagaaggcatctttgggggaagtgaggagaacacacctctggacttggatgatcatggtggcagaaccttcctcagggtcctgctccacttgacaatgcatgattacccacccctggtgtctggggccctgcagctcctcttccggcatttcagccagaggcaggaggtccttcaggccttcaaacaggttcaactgctggttactagccaagatgtggacaactacaaacagatcaagcaagacttggaccagctaagatccatcgtggagaagtctgagctctgggtatacaaaggccagggtcccgatgagcctatggacggagcctctggtgaaaacgaacataagaaaactgaggaggggaccagtaagccactgaagcacgaaagcaccagcagctacaactaccgagtggtgaaagagattctgattcgacttagcaagctctgtgttcaagagagcgcgtcggtgaggaagagcaggaagcagcagcagcgactgctgaggaacatgggtgcccatgctgtggtgctggagctgctgcagatcccctatgagaaggccgaagataccaagatgcaggagatcatgaggctggctcacgaatttctgcagaatttctgcgcaggcaaccagcagaaccaagctttgctacataaacacataaacctgtttctcaacccagggatcctggaagcagtgaccatgcagcacatcttcatgaacaacttccagctgtgcagtgagatcaacgagagagtggtccagcatttcgttcactgcatagagacccacggtcgaaatgtccagtatatcaagtttctccagactattgtcaaggccgaagggaaattcattaaaaagtgccaagacatggtcatggctgagcttgtcaattctggagaggacgtcctcgtgttctacaatgacagagcctctttccagactctgatccagatgatgcggtccgagcgtgaccggatggatgagaacagccctctcttcatgtaccacatccatctggtggagctcttggctgtgtgcacagagggcaagaatgtgtacacagagatcaagtgcaactccctgctcccgctcgatgacatcgttcgtgtggtcactcatgaagactgtatccccgaggttaagattgcttacatcaacttcctgaatcactgctatgtggacactgaggtggagatgaaggagatttacacaagtaatcacatgtggaagttgtttgagaatttcctcgtggacatctgcagggcctgtaacaacacaagtgacaggaagcatgcagactcggttctggagaagtacgtcactgaaatcgtgatgagcattgtcaccaccttcttcagctctcccttctcagaccagagtaccactctgcagactcgccagcctgtctttgtgcagctcctgcaaggcgtgttccgagtttaccactgcaactggttgatgccgagccagaaagcctcggtggagagctgtatccgcgtgctctctgacgtagccaagagccgggccatagccattcctgttgacctagacagccaagtcaacaacctcttcctgaagtcccacaacattgtgcagaaaacagccatgaactggcggttatcagcccgcaacgctgctcgtagagactctgtcctggcagcttccagagactaccgaaatattattgagaggttacaggacatcgtgtctgccctggaggaccgactcaggcccctggtccaggccgagctgtctgtgctcgtggatgttctacacagaccggaactgcttttccctgagaacacggatgccaggaggaaatgcgaaagtggaggtttcatctgcaagctcataaaacacaccaagcagctgctagaggagaatgaagagaaactgtgcattaaagtcttacagaccctcagggaaatgatgaccaaagatagaggctatggagaaaagcaaatttccattgatgaattggaaaatgccgagctgccacagccaccggaagctgagaactccacagaggagcttgaaccaagtccacccctgaggcaactggaagaccataaaaggggtgaggcactccggcaaattttggtcaaccgttactatggaaacatcagaccttcaggaagaagagagagccttaccagctttggcaatggtccactatcaccaggaggacccagcaagcctgggggaggagggggaggtcctgggtccggctccacaagccggggtgagatgagcctggctgaggttcaatgtcatctcgacaaggaaggcgcctccaatctggtcatcgacctcataatgaatgcatccagcgaccgagtattccacgaaagcattctcctggccatcgcacttctggaaggaggcaacaccactatccagcactcatttttctgccggctgacggaagataagaaatcagagaagttcttcaaggtcttttacgatcgaatgaaggtggcccagcaggaaatcaaggcgacagtgaccgtgaacaccagcgatttgggaaacaaaaagaaagatgatgaagtggaccgggatgccccatcccgaaagaaagccaaagagcccacaacacagataacagaagaggtccgggatcagctcttggaagcatctgctgccaccagaaaagcctttaccaccttccggagggaggccgaccctgatgaccattaccaatctggggagggcacccaggctacaacggacaaagccaaggatgacctagagatgagtgcagtcatcaccatcatgcagcctatcctgcgcttcctgcagctcctgtgtgaaaaccacaaccgcgatctgcagaatttccttcgttgccaaaataataagaccaactacaacttggtgtgtgagacactgcagtttctggactgtatctgtgggagcacaactggaggccttggtcttctcggactgtacataaatgaaaagaatgtagctcttatcaaccaaaccctggagagtctgactgagtactgtcaagggccttgccatgaaaaccagaactgcatcgccacccacgagtccaatggcatcgatatcatcacagccctcatccttaacgatatcaaccctctggggaagaaacggatggacctggtgttagaactgaagaacaatgcttcaaagctactcctggccatcatggaaagcagacacgatagtgaaaatgcagagaggatcctgtacaacatgaggcccaaggagctggtggaagtgatcaagaaggcctacatgcaaggcgaagtggagtttgaggatggggagaacggtgaggatggagcagcctcccccaggaacgtgggccataacatctacatcctcgctcaccagttggctcggcataacaaagaacttcaaaccatgctgaaacctggaggccaggtggatggcgatgaagctctggagttctatgcgaagcacacagcacaaattgagattgtcagactggaccgaactatggaacagattgtcttccctgtgcccagcatctgtgaatttctgactaaggaatcgaaacttcgaatatattacaccacagagagggatgagcaaggcagcaagatcaatgacttcttcctgcgctccgaggacctctttaatgagatgaactggcagaagaaacttcgagcccagcctgtcttgtactggtgcgcccgaaacatgtctttctggagcagcatctccttcaacctggccgtcctgatgaacctgctggtggcgtttttctacccatttaaaggagtgagaggaggaacactagagccgcactggtccggcctcctgtggacagccatgctcatctctctggcaattgtcattgcgctgcccaagccccatggcatccgggccttaattgcttctacaatcctacgactgatattttcagttggattacagcccacactgtttctgctgggagctttcaatgtctgcaataaaatcatcttcctgatgagctttgtgggcaactgtgggaccttcaccagaggctaccgagccatggttctggacgttgagttcctctatcatttgctgtatctactgatctgtgccatgggcctcttcgtacatgagtttttctatagtttgctgctttttgatttagtgtacagagaggagactttgcttaatgtcattaaaagtgtcacccgcaatggacggcccatcatcttgacagcggccctggctctgattctggtttacctgttctcaattgtgggctacctgttcttcaaggatgactttatcttggaagtagacaggttgcccaatgagacagctggtccagaaactggtgagagtttggccaacgatttcctgtactctgatgtgtgccgggtagagacgggggagaactgcacctctccggcacccaaagaagagctgctccctgtggaagaaacggaacaggataaggagcacacgtgtgagacactgctcatgtgcatcgtcaccgttctgagtcacgggctgcggagtgggggcggagtaggagatgtgctcaggaagccatccaaagaggagcctctgtttgctgcaagggtgatctatgacctcctcttcttcttcatggtcatcatcattgtcctgaacctcatttttggggtcatcatcgacacctttgctgacctgaggagtgagaagcagaagaaggaagagatcttaaaaaccacgtgcttcatttgtggcttggaaagggacaagtttgacaataagaccgtcacctttgaagagcacattaaggaagaacacaacatgtggcactatctgtgcttcatcgtgctggtgaaagtgaaggactccaccgagtacaccgggcccgagagctacgtggcagagatgatcagggaaagaaaccttgattggttccccaggatgagagccatgtccctggtcagcagtgactctgaaggggaacagaacgagctgaggaacctgcaggagaagctggagtccaccatgaagctggtcaccaatctttctggccagctgtcagaactaaaggaccagatgacagaacaaaggaagcagaaacaaagaattggccttctaggacatcctcctcacatgaatgtcaacccacagcagccagcctaagcaaatgagacggagggactgtactcaaccctttttaaattattgtcagcgtgggtctggctcttggttctgatctgccctctaaggttacatgtgcgcttagtacatttgtaaatactcggttttgtattgtatgtatatgattgcaattctcagaggtttggactttcgtattgtaattagctctgttggcatggtgacttgtcactcctgccaaaaatattaaaaatgccttttttggaaggactacagaaagtacctgatttgcacttgaaccagattatagatttaaaaagtatttgacatgtattttgttatttaaaactagaatagccagtatttatgttttttataaaactgtgcaatacaaattatgcaatcaccataactctgtaactcctgagtgtcttaagggagtgcgcatctttgaagctgatctgttaatacttatgtaataaatggttaaatatcaaatgatgatgctgctgccaaaattatattaatagcaagtttctggcccctgggcaattttgtaccttgtaattatcctatggtgatgctgtttctcgttgctaatggcattagtgcctcgtatcctagtgataactccaggtctgtgaaccattcaaacaacattcatttttgagacaaagcaactttagtttcaagggtaattttaagcttcaaaattaatcatttaaagtatttctttaagagagccatgttagaggctcacacgttagcttgaaaggagtcgatgaaataatttttttaaagggaactttttacacgacgtttggaataacagcatattgctgaccagtcagtgtcatctcccaggtgaattttgatgtcacgttatagtcaaatgagctagcttatggtttctagattctcttcatctgaaccaacatgatgcagtaggtgagaagttattatgcatatatacacatatacatccatataaggcaaagtaggagctgtccccttaggatgcatagctgcccccttagggtgcagagctcaacactgacagtgctgttctgagagagccacgtttgggttttatttctttgtcacatgatttcttttctggatgtgtgcaagtataacaggaagtgttttctacctgttgcttgttttgtacctgggtctcgttttactagaccatctctgcacaaaagtttaaaaaatgaaccgtaagcagagttctgaagcaagtcaagtttgtaagtgcatacctgaaattatttaataaatgacgcagaatact

SEQ ID NO: 794 - DNA, 2639 bp, Rattus norvegicus
  Genbank Accession No. K03243
gaatgctggcagtgtgggtgctatgtaaaagtatttacatagctttgtagagtgagccaagcccagtctgtttgggatgactcttcacagtgcctcgaatctgtcacacgtcttagtaagcagagtcacagagtttctgtcacatcatcctcctgcctacagggaagtaggccatgtccctgccccctactctgagcccagctgtgggagccagccctgcccaatgggctctctctgattgacttctcactcacttctaaactccagtgagcaacttctctcggctcgttcaattggcgtgaaggtctgtgtcttgcagagaaggttcttcacaactgggataaaggtctcgctgctcaagtgtagcccagtagaactgccaagccccttcccctcctctccctagactcttggatgcaagaagaatccaggcagctccaagggtgattgtgtccaacctagaatgtcttgaaaaagacattaaggggactagagaagacaggggatccaacggttctctgcagcccagcctgactgacatgtaactcttctggttctcaccagccagctggacctgcttagtattctttctgcctcagtttcccagcctgtacccagggctgtcatagttccatttcaggcagtagtaatgaatgagctgacataaaacatttagagcaggggtcagtatgtatatagagtgattattctatatcaggcattgcctcctcggaatgaagcttacaatcacccctccctctgcagttcatcttggggtggccagaggatccagcagacacctagtggggtaacacaccccagccaactcggctgttgcagactttgtctagaagtttcacgtctcagagctgaattcccttctcatgacctttggccgtgggagtgacacctcacagctgtggtgttttgacaaccagcagccactggcacacaaaatgtgcagccagcagcatatgaagtccaagaggcgtcccggccagccctgtccttgacccccacctgacaattaaggcaagagcctatagtttgcatcagcaacagtcacggtcaaagtttagtcaatcaaacgttgtgtaaggactcaactatggctgacacgggggcctgaggcctcccaacattcattaacaacagcaagttcaatcattatctccccaaagtttattgtgttaggtcagttccaaaccgtgctgaccatggctatgatccaaaggccggccccttacgtcagaggcgagcctccaggtccagctgaggggcagggctgtcctcccttctgtatactatttaaagcgaggagggctagctaccaagcacggttggccttccctctgggaacacacccttggccaacaggggaaatccggcgagacgctctgagatctctgatccagaccttccaaaaggaggaagaaaggtaggcagggccattccactctcctctccaaaagtaccactgaggggtccactcacagtctttgccctgacaaccaaggccctctagccatgtgcaactcatgcaaagtctacagaaggaacgggaagggcccatgggtgccggtgttcaagagcctctctttttgtttcaggtggcaccagagtccctgcctctctccacaccattgcaagaatgcctcctcagctgcataatggtctggacttctctgccaaggtcatccagggcagcctcgacagcctgccccaggaagtgaggaagtttgtggaaggcaatgcccagctgtgccagccagagtatattcacatctgcgacggctccgaggaggagtacgggcggctgctggcccacatgcaggaggagggtgtcatccgcaagctgaagaaatatgacaactggtgagtcccttcagcccaaagtctctgcctacaggctccccagctctaccttctcggagtctggagaataaagacccttgcagtagcaaacgcctgagaagcttaggagatcagtcagaatccagacaccctgtgaggttagcatagccagcttctagattccagatagccatgcaaggcggcccctttccctagggccagctcatggcttagcaaatgtctacctggtcaagttcccgttggcttggcttccatacctaagtaacacggtcaacgtccttgtgtctgcaaggccgggaagagcctgaggtaggcaagagaggtacatccccaagggtaccttgctgaaggcatccctgtgactttttcagttggctggctctcactgaccccagggatgtggccaggatcgaaagcaagacggtcatcattacccaagagcagagagacaccgtgcccatccccaaaagtgggcagagccagctgggccgctggatgtcagaagaggacttcgagaaagcattcaacgccaggttcccggggtgcatgaaaggtgggtgaggccagaccccaggcctgacagtgtgctgtgtgcacgttcacgctcccggtagtagcttaagctgcaaagggtggcccgcgtgcgaagctccgcgtctggttctgtctcacggaatatcaaattgttctctgagagtacgggtggctccgacctgtcatctcagacatggaagctgaggcaggggcattcaaagtttaaggcc

SEQ ID NO: 795 - DNA, 551 bp, Rattus norvegicus
  Genbank Accession No. L00117
gcgccttccagccgtcgggtacatggagccttggtccatgaatgctggctcacagccattctaagacctgtccttgcttgtcttggcgtacaccgaggcatcttgtcgtacaacacctactctctctgactgtcccataaacccagtgtgctgccacacccaacaagtgagaggacaggttacggactgagtatcctgtcttttcctcaggtcattgcctacaactgaacgtcttcctgagtccagtggcctccccaagatggtgcttagctctgcaataagatctgaagtaagcgagaaggagttagggctggggttatcgctcagcggcagaacactttctaatatgtgcgaagcctgggttccatccctaatactgcagcgggggcaggggagtgctgctggtgtctctctgctctttctccagtatctggggcaaaggtggttaatgaaaaacagctctgagactgagccagatacagaaaggcaaataaaactcaatgtgttatcatactgtgtgttcgcgttggtaattaagcccctacaggaaa

SEQ ID NO: 796 - DNA, 116 bp, Rattus norvegicus
  Genbank Accession No. L13237
tttaaagtaatccttggctacctagtgagtgtaaggccagcctggaatcaataagagttggtttcaaagaagcaggaggagaaggaggaacaggaacaggaggaggagcaggggga

SEQ ID NO: 797 - DNA, 209 bp, Rattus norvegicus
  Genbank Accession No. L14002
cagatactctcgacctcttacatttggagagttttgagcagacaggaagaagacggagcctgggagcagctgttctccaatagtcaaattaagactgttcctctctgagctctgtacttcaaccagcacctttaggcagaagccatcaaatcagaaatgtctgttaataattaaagtctatgattgccaccaaaaaaaaaaaaaaaaaa

SEQ ID NO: 798 - DNA, 115 bp, Rattus norvegicus
  Genbank Accession No. L14003
aatcccaatattaagaggttaaaaaataggaccagaagtttaaagtaatccttggctacctagtgagtgtaaggccagcctggaatcaataagagttggtttcaaagaagcagga

SEQ ID NO: 799 - DNA, 7204 bp, Rattus norvegicus
  Genbank Accession No. L14323
cgcaaagttgggcagggagctgggggaggaggaccgcgagcgagggtggcggagcaggggcgggaggagcggagggaggaggggaccggagcgtgtcactcgcgcgctccctctgtgcacagaggatgtgctgaatggtgcgcttccaggcggcggccgagcaggatcaggcggcgggcggctcgcactgccgggctctgctccttcttgtctcccgaggctctacaatcaccgcgggctccagaccctgcgtcccgcccggggcatggcaggctgctgtgccttgcggtgtagtcccgcttactaagcggcgcgggccagaggtgcggaggccaagaggccgggaggtcggcgggcagcggaggcaagagcctgctgaaccgagagccaagcccgcttgcgcccggagctccgtgtcccgtctccactgcgctcgcccgggccgcccggagccccgatgagcccagatggctggggctcagcccggagtgcacgccttgcaactcaagcccgtgtgcgtgtccgacagcctcaagaagggcaccaaattcgtcaagtgggatgatgactccactatagttactccaattattttgaggaccgatcctcagggatttttcttttactggacagatcagaataaggagacggagctgttagatctcagcctcgtcaaggatgccaggtgtgggaagcacgccaaagctcccaaggaccccaagttacgtgaacttctggatgttgggaacatcggacacttggaacagcgcatgataactgtggtgtatgggccagacctggtgaatatctcccacctgaatcttgtggcttttcaagaggaagtggccaaggaatggacaaatgaggttttcagtttggcaacaaacctgctggctcagaacatgtccagggacgcatttctggagaaagcatatactaagctcaagcttcaggtgaccccagaagggcgcattcctcttaaaaacatctatcgactgttttcggcagaccggaagcgagtggaaactgcgctagaggcttgtagtcttccatcgtcaaggaacgattccatccctcaagaggactttactccagatgtatacagagttttcctgaacaatctttgtccccgacctgaaattgataacatcttctctgaatttggtgccaaaagcaaaccgtaccttactgttgatcagatgatggattttatcaaccttaagcagagagatccccggctgaatgaaatactttacccacctctgaagcaagagcaggtccaagtgttgattgagaagtacgagcccaacagcagcctcgccaagaaagggcagatgtcagtggatggattcatgcgctacctgagcggagaagaaaatggagtcgtttcacctgagaaactggatttgaacgaagacatgtctcagcccctgtctcactatttcatcaattcctcacacaacacctacctcacagctggccagttggctgggaactcgtctgtagagatgtatcgccaggtgcttctgtctggatgtcgctgtgtggagctggactgctggaagggcaggaccgctgaggaagagcctgtcatcacccatggattcaccatgacaacagaaatatccttcaaggaagtcatagaagccatcgcagagtgtgcgttcaagacttctccttttcccatcctcctttcctttgagaaccatgtggattccccgaagcaacaagccaagatggccgagtattgccgattaatctttggtgatgccctccttatggagccactggaaaaatacccactggaatctggggtacctcttccaagccctatggatttaatgtataaaatcttggtgaaaaacaagaagaagtcacacaagtcgtcagagggaagtggtaaaaagaagctctctgagcaagcttccaacacgtacagcgactcttccagcgtgttcgagccttcgtctccgggagctggggaagcagatacggagagtgatgacgatgacgacgatgatgactgtaaaaagtcttccatggatgaggggactgctggcagcgaggccatggccacagaagagatgtctaacctggtgaactatattcagcctgtcaagtttgagtcctttgaaacttcaaaaaaaagaaataaaagctttgaaatgtcttccttcgtggaaaccaaaggactcgaacaactcacgaagtctccagttgaatttgtcgaatacaacaagatgcagcttagcaggatatatcccaaaggaacacgcgtggactcatccaactacatgcctcagctcttctggaatgctggctgtcagatggtggcgctcaacttccagacagtggatctagctatgcagataaacatgggcatgtacgaatacaatgggaagagtggctacaggctgaagccagagttcatgaggaggccagacaagcattttgatccatttactgaaggaatcgtagatgggatagtggccaacactttatctgttaagattatttcaggtcagtttctctctgataagaaagttgggacttatgtggaagtggatatgtttggtttgcctgtggacacaagaaggaaggcatttaaaaccaagacatcccaaggaaatgctgtaaatcctgtctgggaagaagagccaattgtattcaaaaaggtagttctgccttctctggcctgtttaaggatagcagcatatgaggaaggaggcaaatttattggccaccggatcttgcctgtgcaagcaattcggccaggctatcactacatctgcctgcggaatgagaggaaccagcccctgatgctgccagctgtctttgtctacatagaagtcaaagactatgtcccagacacgtatgcagatgtaattgaagcattatcaaacccaatccgatatgtcaatctgatggaacagagagctaagcagttggctgcattgacactggaggatgaagaggaagtcaagaaggaggctgaccccggggaaacgtcatccgaggctccaagtgaaaccaggacaactccagcagagaatggggtgaatcacaccgcaacccttgcacccaagccaccttcccaggctccacacagccagcctgctccagggtctgtgaaggcacccgccaaaacagaggatctgattcagagcgtgttaacagaagtagaggcgcagaccattgaagagctcaagcaacagaaatcgttcgtgaaacttcaaaagaagcactacaaagaaatgaaagacctggtcaagagacaccacaagaaaaccaccgagctcatcaaggagcataccaccaagtacaatgagattcagaatgactacttgagaaggagggcagccttggaaaagtccgccaaaaaggatagcaagaagaaatctgaacccagcagcccagatcatggctcatccgccattgagcaagacctcgcggccctggatgcagaaatgactcagaagttgatagacttgaaagacaagcaacaacagcagctgcttaatcttcggcaagagcagtattacagtgagaagtaccagaagcgggagcacattaaattgctcattcagaagttgacagatgttgctgaagagtgtcagaacaatcagttgaagaagctgaaggaaatctgcgagaaagagaagaaggaattaaagaagaaaatggataagaagaggcaggagaagataacagaagccaagtccaaagacaaaagccagatggaagaggagaagacagagatgatccgatcatacatccaggaggtggtgcagtacatcaagaggttagaggaagcacaaagtaaaagacaagaaaaacttgtggaaaaacacaaggagatccgccagcagatcctggatgagaagcccaagggggaaggctcctcctcagtcttgtcggaaagttgccatgaggatccctctgttccccccaactttactccccccaaccctcaagctctcaagtggtgagcaccgtccttctagccagctgcagatggagctggagcaagaataccaagacaagttcaaaagactgcccctggagattctggagtttgtacaggaagccatgaaagggaaggttagtgaggacagcaatcacggctctgcccctccctcgctggcctcagaccctgctaaggtgaacctcaagtctccctccagtgaggaggtacaaggagagaacgcgggaagagagtttgatactcctctgtgatgtccctgccgggcctaccagacatgcacggctgcttgaactccatcggactctaaagacaaagatcactgcccgggccatcttcctgagaaacatcccttagcctgaaatccacaccaaagggagagttccagaaggatccgtgtgaaggtcccatacccttgtcccttgtgtcatgtggaaactattgtggtcttagagagaagggtgcatgtatgcaggatttttcttttcgttccaatagtaaattaaaagcaggcagctccaggctccatggactatgtaatgaaggacaatgtcttctttgaagaaaactagagctcgtgtcttcgtttgaagccctggtgtacagtatttccaagtaaaagagagagtttgagaagtgcgcggcaccatttaacactctggaacattccactctgagcattgtttccctgactgccccgcaaacccatgttttcaagttaacgtgtatagtgcattgtttcaccctttgctttgcaggcactggtggcttgccatttgctaatttatttatcccagaggcatctgtatttgctattgacatggctttattagataccatagtgactcatataagctggtttcttttataaaaaaaaatcacatgactgtatcatttcccagtgaagccattttacgattagcaatatgggttgtatatttggctgcacgtctttggatatctatcggttgttgacctgaggctatcaaacagctgcaatgggtttgttctgttgagtcagggtttccgccagactgaacaggatccagtgggctattttattgtcagatattttttcgtggttcatttatttttactgtagaaaggaagatagaatatttatctaaatgcacatgtataaatgatatacattatctccatgtatatagtacatgtatgcacccagccatataagtgcacacacatacatacgcatgagtgtacatgtgtgtttattaattggcagtgacccaaatctcttccataagatttaaaagcaagttcagggatacatggacagagaagaaatgggtcgaatatatgttatgtggataattaaattatacggaaatgctaagaatcagtttatggagtcaatgatgcaacttgaggtaatcttagaatttagaaaatgagtttactaaaaaaattggaggatcaaaaattggattttaagtatcagattttgagcttgttttaatggtcagtgtatgcaaaaatgcataggaaatagagtgcaaatgtattactactatcttcaataaattttaactgaataatttcaattttatactgatagaaataaagctctggttgtattttagtttgtatatttacttcacttagttatgtcttttttaattcttattttattctaaagtgaataagagaaacaaattatatcatgctaacgctaataaaatcataattaaaaggtcttaagaaataatattatatagaaaaaatatggtttagagagtgggacaaagaacattaaaacccagcaatgacaatgcccatggcttcattttattttaaagtgaacctgtctgcttataatttagcaaagcaaaaaacagttgtgtcctgaagtttgtgtttcaagaatttagtatttttctggaaataattttatttaactttaagcaataactaggaccataattaagtgttaatcaaaatgaaggcttgtttcaaacaccatgaaagtgtttgatcacacacatacaccacacacacacacacacacacacacacacacacacacacacacacacacctattgagacacaaggggaaaaaaatcacatccccttcagagatgattgtattttatctgaaggatcaagagtgttaattagtcacttactaaagcttaccttccactgaagagagatctcttgtgaaccatacaacttttgcactttgaaggaaaggcattactcagaaggaagtgaggacagtccaaatggaatgctgcattttacacacacagttacagactgttgaaaattggggaagagtgaatggataacaggattcgaaaccaaacttagtggtggttgttgcggaacattggatttcaacatactccatacagcgactgaggttgaataaccttgactttcaaatcctgttttggtagttggacttcattatcttggtgattctagtcattttacaatgttttgtatttggtcatttactgtaatcacatttttatatctgtacagtgacactttttgcagttgtggggtagtgtgtaacactgtgcatcttgcatcatcgaaactactaccgtgatactatccattgataatattaatattacttgaaaaatgacaaaggtaaagaaaaggggtctgtatgatgtgcagttttgtgcctttatgtatttgccttgttcttcgttgaatgtgtgaaattctgtactgtggtttttccaatagtagaaagtagagtcatgcattaaattagactgtatccctgacacctttaaactactgagaataacgtggttggccgtgtaattcagtgttcaaagttctaatgacatgccatgtgctttggtttttaacatttcatgaccaccatacattaattaatactcctgtaatagataagcagtcattaattaagttccaaaagaaagggccattgcttgcattcctttgaatttaatgttgcccttgtacactgtgttaatactgtatgtaatggattgaacattgtgattctcgccttttaagaagagaaagagagagaaggaaaagtatttgatgctcttaaaatgtacatatttgggttcttctatctcaaattatttaaaatgcataattcacatttttttgtaatcattctatgcaattttgtggcatgacgtttcttccacttgtaattttctgtgctttcatcacaagtccaaaggaaacaataaaaatt

SEQ ID NO: 800 - DNA, 2643 bp, Rattus norvegicus
  Genbank Accession No. L25387
gtgaccaggactcttcgacgtccagcacctcctttccgaagtacctggagcacctctctggggatggcaaagcatggtgtcctgaccagcggcggggagtcccaaggcatgaatgctgctgtccgtgctgtggtgcgcatgggaatgtacacgggggcccaagtgtactttatatacgagggttaccaaggcatggtggatggaggctccaatattgtggaagccaagtgggagtgtgtctccagcattctacaagtgggtgggaccatcatcggcagtgcccgttgccaagccttccgcagccgtgaagggcgtctgaaagccacctgtaacctggtacgcttgggcataaccaacctgtgcgtgatcggtggggacggaagtctcacgggagccaacctcttccggaaggagtggagcggtcttctggaagagctggctaagaatggtgagatcgattcggacacagtgaagaagcacgcctacctcaacgtggtgggcatggtgggctccattgacaatgacttctgtggcacagacatgaccatcggtacagattcagctctgcaccgaattattgaagttgttgatgccatcatgaccactgcccagagccaccagagaaccttcgtcttggaggtgatggggagatactgtggttacttggccttggtgagcgccttggcttgcggtgccgactgggtgttccttccagagtctccgccagaggaaggttgggaggaagaaatgtgcctcaaactctccgagaaccgtgcccgaaagaaaaggctgaatatcatcattgtgtctgaaggagcaatcgacacccaaaataagccaatcacctctgagaaaatcaaggagcttgtggtgacaaatttgggctttgacacccgggtcaccattcttggacatgtccagagaggagggaccccttctgcatttgacaggattttggccagccgtatgggagtggaggctgtccttgccttgctggaagctacccctgagaccccagcctgtgtcgtgtcactgagaggaaatcaagctgtacgcctgcctctgatggagtgcgtgcaaatgacccaggatgtacagaaagcaatggatgaaaggagatttgatgaagccgtaaaactccgaggaaggagttttgagggcaacctgaacacctacaagcgtcttgccattaaggagcctgatgacaagatccccaagagcaattgcaatgtagccatcatcaatgtaggggcacctgccgcgggaatgaatgcagccgtccggtccgctgttcgggttgggattgcagagggccacaagatgttcgcaatctatgacggctttgatggcctcgccaatggccaaatcaaagaaatcggctggggagatgtcggaggttggacaggacaaggagggtccattcttgggacgaaacgcaccctacccggaaagtacttggagaagatcgcagaacagatgcactcgaaaaatatcaatgcccttctgatcattggcggattcgaggcctacctgggactcctagagctggcagctgcccggaacaaacatgaggcattctgtgtccctatggttatggttcctgctactgtctccaacaatgtgccaggttctgatttcagcatcggggcagacacggctctgaacactatcacagacacgtgcgaccgcataaaacagtcagccagtgggaccaagcgccgggtgttcatcattgagaccatgggcggatactgtggctacctggccaacatggggggacttgcagcgggacgcgatgctgcctacatctttgaagaacaatttgatatccgagatttgcagtccaacgtcatgcacttgacggagaaaatgaagaccagcatccagaggggccttgtcctcagaaatgaaaactgcagtgtaaattacaccacggacttcatctaccagctctactcagaggaagggaaaggagtgtttgactgcaggaagaacgtgctaggccacatgcagcaggggggagcaccttctccattcgacagaaactttggaaccaaaatatctgccaaagctatggagtggatctcggccaaactgaagggctcccacggcacagggaaaaaatttgttagtgatgattccatttgtgtcctgggaattcagaagagagacctcctgtttaaaccagtggcagagctaaggaaggctactgactttgagcaccgtatccccaaacaacagtggtggctgaaactgctaccaatctcgaagatcttggcaaagtatgaggcaagctatgacatgtcagacgtaggcaagctggagccggtgcataaccacggagaactatcagccatctgattgaatatgccgtctcctgacctgcacacttacctagggaagcctgtaatgttctccagggaccacccctttttgtaacatagttatttatcagcactctatgcaagaattgttggccgagtattgtcagcagtaataatcagagagcatcacttgctataaccattgacgcaacagaccctaagacatgaaacccagcctcgcgcgattgatcacgtgtcagttttctactgtaccgggtactactgtcttgtgctttaccatgtgtgtatcttgtgggat

SEQ ID NO: 801 - DNA, 1882 bp, Rattus norvegicus
  Genbank Accession No. L38615
tggagtttgagcttggcgagcagctggacaacgagcgagttgggatggccaccagctggggaagcatcttgcaggatgagaagcagctggaagagttggcacagcaggccatagaccgggccctggctgagggggtgttgctgaggtccgcaaagaaccccagctcctctgacgtggtgacgtatgccccattcacgctcttcccctcaccagtgcccagcactctgctggagcaggcctatgctgtgcagatggacttcaacatcctggtagatgctgtcagccagaactccgccttcctggagcaaacactgtctagcaccatcaaaaaggatgagtatactgcccgtctctttgatatctacaagcaagtcctgaaagagggcatagcccagactgtgttcctgggcctcaatcgttcagattacatgttccagtgcagcgcagacggctccaaagccctgaaacagattgagatcaacactatctctgccagctttgggggcctggcctcccggactccggctgtgcaccgacatgttctcaatgtcctgaataagaccaacgaagcttccaagatcctgtccaacaaccccagcaagggactggccctggggatcgccaaagcctgggagctctatggctcagccaatgccgtggtgctactgattgctcaggagaaggaaaggaacatatttgaccagcgtgccatagagaacgagctgctagacaggaagatccatgtaatccgccgaagatttgaagatgtctctgaaaggggttctctagaccaaaaccgaaggctgtttatggaggaccaggaagttgctgtggtttacttccgagatggctacatgcccagtcagtataacgcacagaactgggaagctcgcctgctgctagagagatcatgtgctgccaagtgtcccgacattgccacacagctggctggcactaagaaggtgcagcaggaactgagcagggtgggcctgctggaagcgctgctcccgggccagcccgaggctgtggcccgcctccgtgccacctttgctggcctctattcactggacatgggtgaagaaggggaccaggctgtcgctgaggcccttgctgcccctagccactttgtgctgaagccccaaagagagggcggaggtaataacttctatggggaggaaatggtacacgctctggagcagctgaaagacagcgaggagagagcctcctacatcctcatggagaagattgaacctgagccttttaggaattgcttactacggcctggcagccctgcccaagtggtccagtgcatctcggagctgggtatttttggagtctatgtcagacagggaacaacacttgtgatgaacaagcatgtggggcatctgcttcgaaccaaagccattgaacatgcagatggaggtgtggcagcaggagtggcagtcctggacaacccctaccctgtgtgaagacatgttctgggcttcactcaagagaccttctatcctctgtacttggcactcctctcctgaggggctacccctgtacctgtgttaggggagggagcttgtctctttcatagacctccaggggctttagggaagggaaaatcccgggtcccttctctcagccttccatccaaggaccagaaaagctatgattccattggaagagttctggagctccccagatttggagtgggaatggaagctcctttgaggcaaaggcccacaaaccccacacatcttcattgccctctcgccagcctttccagcaggttctagtgccttgacctggggtaggaccaagtgacaggaggaagagggtagatgggcatagacttccccagctctgccctaaataaaacaatgctgattcaatg

SEQ ID NO: 802 - DNA, 1592 bp, Rattus norvegicus
  Genbank Accession No. L40362
gtcgaagcagcccgacggatttagccaggtccgggatctcagatgggggcaaaggcacctcaggcgctgctcctgctggtggcggtcgccctggccccgacccagacccgcgcaggctcacactcgctgcggtatttcgaaaccgccgtgtcccggcccggcctcggggagccacggttcatctctgtaggctacgtggacgacacggagttcgtgcgctacgacagtaacgcggagaatccgagatacgagccgcgggcgcggtggattgagtgggagaagccggactattgggagacgcagacacggagagccaagggaaacgagcagatttaccgagggagcctgacgaccctgctccactactacaaccagagcgaggacggctctcacaccatccagtggatgtatggctgtgacgtggggtcggacgggagcctcctccgcgggtattggcagcacgcctatgatggccgcgattacctcgccctgaatgaagacctgaaaacgtgggaggcctcggacagagcggcgcagaaaacccggaacaagtgggagcggaaaggtgttgcagagagaagcagggcctacctgaagggcacatgtgtggagtcgctccgcagatacctggagctcagaaaggagacgctgctgcgctcagatcccccaaaggtgcgtgtgacccttcaccccagacctgaaggtgatgtcaccctgaggtgctgggccctgggcttctaccctgctgacatcaccctgacctggcagttgaatggggaggacctgacccaggacatggaacttgtggagaccaggcctgcaggggatggaaccttccagaagtgggcatctgtggtggtgcctcttgggaaggagcagagttacacatgccttgtggagcatgaggggctgcctgagccgcttacccagagatgggagcctcctccatcaactgattccaacatgggaatcattgctgttctggctgtcgttggagctgtggctgtcattgtacttgtggccctcattggagttgttgtgaggaggaggaggaaaaacataggtggaatatgaggagattacgcccctgctctaggcagggacagctgccagagctctgatgtctctcccagattgtaaagcatgaagacagctgcctggagtggactgagtgacagatgatgtgttcaggtctctcttgtgacatccagagccctcagttctctttagacaccagtgtctgatgttccctgtgattctatggcttcagtgtgaagaactgtggagcccagcctgccctgcacttcaggaccctgtccctgcactgccttccttcccttcctaggccaaccttagtggtccagcctgggggtggggggtggggacatctacatcctgtccctccttgctgccctgagtgtcagcccctcacttccacactgagaataagaatctgagtgtgaacttgattgttcacatccttgactcaagtgtggatggctttttcaattactggatggaatacttagaggtttttcgttttggggttttgttttgaaaaaaaataaatggcagatggagaagcttggaaa

SEQ ID NO: 803 - DNA, 8351 bp, Rattus norvegicus
  Genbank Accession No. M11794
gaattccatcagaatttgcctttctggtggcttctctttccctgcccttgtggtgtttttccttcagtgagtgacaaatttcacaaccctggctgggactcccgaggtgctaagattacaggcctgggtcacaccacccaaacctgactttctttttcattgttgcttgtatttttctgtttgtaaccaaagctggacgactggaactcactgtgtagactaggctggccttgaactcatagaactctacttgcctctgcctcctgagtgctctgattaacggcactgaccaatacatccaacctacctactttcattttctaaatctaagtcctaacaggaagtgggaactgggcaggaataacagtacggtgggttaactccatgagtttaccggactttgcgagcctcgactgccaacgacatcctggcttgaggctggaagtcacagcccaacaggggcaaagattgctctgtgaccagtctggaaagggagcactggagcacagaaatcaatccggttcaagttcatacccagggcaaccacggaaagtgccaggaaaggaaagaacaggatgttttccacacattccatgggcagccatggggatccaggagaaagtgatgcttggctgagccaagaagcagtgccccagtttacagtaagggctgagaggacagcctgtcctgagcttccggtaacacatttcctgccttctcaaatgacagacattccatctacgactttgagtctgatttcagcagtcttatgcaagaggggaaacaccatatgcctccagggaaagaaaatttggctgccgtctccaccctttccctcagcatccaccgtgggtgggggtggggagggttagtggggctttccatccctgtctttcagaacactacgatctggccctttctgcttggccaacacctgcgcagagtcctagttcatatcctcccagaatggcctgctctccacctccagcagagacccccatcattttttcctgttcactctctgccccccaccccccaccaagaataagtatccttagcacaaggcttgtgtctttatggtctctagtctctgacaactggctggagtctcagtggattcgaaccctccattcatcttgggctaatgactatgtgattgcgcctccgtttccacttttctactgtgaaaataatgaacaccccaagctatgttgtaaggaaaaatgagagccctaacagtgcccccagcacgtgacacgcagggggtacgtgacacgcagggggtacgtaaccaaggccggtaaagtctgggctagggctggtttttgttacctgttcacactgtcagctaggttttcctgtatgcggggtctccaagccccgctttcacctaagttagcactcaagacgtgctgtggggactgtgtccccgtggacgctgcagggggttcgatgtcccgcaactcctctgcacccggccacttgggcccagggcacgtgagcaggtttcctggaaccggtccccaccggatcgcagaccctttgcgctcagccctttgctctcagtccctgcgccaggagaaagggggtgtgactcagcgcgggggcgtgtgcaggctctgtacccacgtgcaaaaggagggatgcttgcagacttcgggtcgtgcgcaggctcccgggcgtgtgcgggccatttcccttgagccagaagaagggcgtgtgcaggcagtggggaggagggcaggtggcgccccgccacccgggcggagcttttgcgcgcgacccaatactctgggctataaaggtcgcgctccgcgtgcttctctccatcacgctcctagaactctacagcgatctctcgttgatctccaactgccgcctccattcgccatggaccccaactgctcctgtgccacaggtaaggggggctgctgacgggcctctgtaaccggagcttctgggagagcaggacggacttttgggcccctactctggtaactacttttagggtactactggctgctgccttccgaacgaattctggaacactcccgccccttttaaactagtccttgagataatggctcgcccaagctggctggcttgcacccgagttctttggagaactgtgttcagttatgcccgggtccgctcaccgcgctccctgccttcttcctctagatggatcctgctcctgcgctggctcctgcaaatgcaaacaatgcaaatgcacctcctgcaagaaaagtgagttggatttattttctctaccctttcccttcgcgcccctgcggtccctagcccgccgcaccttcccagagcgtccaggctgcctctaactcggtttctcgctcacgctcaacttttttcccccaggctgctgttcctgctgccccgtgggctgtgcgaagtgctcccagggctgcatctgcaaagaggcttcggacaagtgcagctgctgcgcctgaagtgggggcgtcctcacaatggtgtaaataaaacaacgtaaggaacctagcctttttttgtacaaccctgaccggttctccacacttttttctataaagcatgtaactgacaataaaataaaaaaacttgacttgattaacccagctttgtctgtgttcattggaaataaggggctggcagaggcgttgaaatgggattggtgcaccttgatttgggataagtggattgatgacccctctggactttgatagtctcgaacatggtgggcagaaacatgtactggtcacaaatgtgggcatgtgtatattggggattaaacccaaagcttcctgcttataaaccagggtgctctaatgagccacactcctacccctagatgcataatgattctggtttaattttggattattaggcttaaagcagtatgaagtacctgttcataagctttggtaaataaaataaaagttggagtgagtctcatacgactcctctttgtagtcccaatatttgggagcctgaggcagaaggatcggtgcaactccgaagccaacttggtctcaaattctgttaacctttgattttgagaccatcttactgtgtaacctaaaatggtccttgaacttgcagtcctgcctcagacttctaggtactgggattacaggctcagcttaaaatcagggctggagagatggctcagcggttaagagcacccgactgctcttccagaggtcatgagttcaattcccagcaaccacatggtgctcacaccatctgtaatgagatcttacgcgttctggcgtaatgcaagcagaaaagacatcagtaacgtgaacaaaaccatgaaaagtactgtaaacactataaatatccaagggtgtgccttgcagtttggagactaaatggcacatgtccaacctagagctcccatgaggaactgcccatctctggtatacagggacacggacaggattttttttttcctcttccagagagccctgtgataggacttggctgtcagtctggaagttcttctcaaggtcaggcagaaatctacctacccctcactccataccaacccctggcaatttaagcaaagtaactagaaatttggaaggaattgactagcatcttcccaggagctaggcatccaggttgagtctgcaatttggagggcggggtggagtttcctactctataggaaggaggtgaatacatgcaattaaaaccagccgttaatgccccctggctatttgttgaggtaatgcgatttggtcttcaatcaaagggaaagtttcttggctagaagtaaggaccaagcttgccgtaggctttctctgtgaagagtaaatttacaagacagcctctgtttcttgctgtcaggaagtcctagttcacagcccactttctctcttattggtcatgtagcctgggcaagtcactgaacccctcaaatgctgatatcctgccctcctagatgctgataaccacctgtccccaaagaacacacgggcaaccaagcacagatctgatttttaaggaatttgttttgtaagtgcagtttgggaatctggcctcatttgtctcttgtgtgcccttgctgacaccattcattcagccctggccttgatttaggtgacaccgaactcgggctgtaccctcagagatttccctctttgtctacaaacaaacaaacaaagcaaatatcctaattaagactcttgtgtgtcaagtagggcatctaggaatgagtgctgggaccactcttagtcccagaatgccttgaaaccaagtgaatgacaattatacatttagcttctcaattaaaatggaagacattgggccgggaattggctcacagtggagagcctaccaggcttttgtgaagctctgaggttcatccctagaaccattaaaaaaaggtccgtgggcctgggaatgtagctccctggtacagtgcttacctaacatgcacggacccctgggtttgctccacagcatggagtaagcagtctgatggcacacacctgtaattctaacacgcaggaggcagaggcaaggaggatcaaacgttcaaggaccacggcaagtttgaggtgtgggccacatgtaaagccgtctccaaaaagacatcacacacaaaacacaacagtattgtgatacacacgtatacctgtatcctagcaacctgggaaactgaagcaggagactgtcttgagttcaaggccagactgggctgttcggtgatcgacaggccattctgagttacagagtgaggcccttggaaaaggagaggaaggagaggaggagagactgggcctggcaacatgcatctatcatcttagctactcaggagactgaggcagggggaggatttccagctcaaagtctagctacagagcacgtctaaagccagcctggacagcttagtgagaccctgtttcaaaataaaaagaatctaaaagactggaggtaaagctccagtgtagaatgcttgcctggtaaccaggaagccttgggttcaatccttactgtaaaaaaaggaaaaaaaatcatattatgcaagaggtctaaaggcccaagaatctgttacagatctcagttttggtaatagacaataaaatataacaagttggtaaaaacaagcaagagtaccaactacaaacatacttcatgtggttcagcagaagcatctcagtatgcatccagaaaacagcagacagacagaattgggcatccttgggctagggcacacctcagcctgacttctacccgagaagccagcagtcttagccagtgcagaaccactggtgtctctgacttgggatctctgcttaggatgcgcccttgagtgcttagaatttgtctctagtcaggctgaatcctctctctttccaaacccagtccttagctatttaaaaccagtaaactcatgagatttggagtcatccaacgttatccaggcaaggattctgtttttttcttaatttttatatttaattgcttattaatttttgaaataggatctcatttgtgtggccctggctggccttgaactcaagaagaccatctgcctctgacttctaatagctgagattaaagaggtagcctcaggcaagaacttaactatagaccaagactcagttccacgtgaagttttttggatcttcccacacagagggtataactgtgtcatctccaagatgaggtatcccgaggaaggagaaatggcctgggtcattgtcaccaaaccagtgggtaataggttaatggaaagacacatgtgtctaaaccaccaaggaggaggaggaagagggcaaagaggggaaagaaggaggagggggaggagtgtcatagcccaggactaggtgccttctttgcctacacacggacctacgtacagaaggacagcatcagagaacttgggacccgtacaggaacattggtgtcaagctgtactgcttcacagcccgttttactactgactggttgtatggcccacccggcaggtcattgaatcctctgtccttgtgtgtaaatagaatttgcatctctatataggtattaggtgagagatcggtttgactcctggttctggcataatcatcatatcgcacagtggctggtggaggtcctataacagttaagcaaaacctgcccaaggtctcatagctctgagtacgcgtgaaccaatggcatagctgatctcttgccctagtctcaagggctgacagaatctaacgttactctaaagtcagaaacattgaaaatataaacagctgcccgtattggttttggtttttgttttttgttttttttttttgtttatttgttttgttttgttttatctaatgcagtccctggatatcacctaaaatgatccctctgcctcggtttttttttttttttttttttttttttttttttttggttctttttttcggagctggggaccgaacccagggccttgcgcttcctaggtaagcgctctaccactgagctaaatcctctgcctcggtttttaaaaccggcctggagtagagccgatggctaaaggtttgtgacccccagcccggaacgtgcctacatatgcccgctcatgagtggggaatatgttgcgatgagtgtccgttggctctgttgctgtgtccagaaggaaggggctcaaccaaagaccatgatgggacagagacagacaataaggacccggaaagttcgtaatcaaggctagtctttataaaactgtctccttcgcctctgctagcttcgattcagagagacgtgggcggagccggtcgctgcccaggaactccaggaaaggagaagctgaggatagcgcgctacgattgtgtttacagagacagttgggcttcctgaggtgtgttctcgtaatgcactggatcagtgatggcctgtaatatcccggaaagcactacagaaacatgatgttccacacgtcacacgggtcctcctacccgggccctcctactcgggcctgtggcaccaaagggggcggtcccgttgtgcacaccggcgcccgagggagctctgcactccgcccgaagagtgcgctcggctctgccaaggacgctgcgctcgtgactgagcgcgggctggagcaaccgccaactgagtgcaaaccctttgcgcccggacccgtccaacgactataaagagagcagactgtccgctaagcctcatcccgacttcagcagcctgactgccttcttgtcgcttacaccgttgctccagattcaccagatctcggaatggaccccaactgctcctgctccaccggtaagacgcccggtccttggtctttagaatacccagttgtaggggtttggcgggaataggcacctttagttgacaattcgtcctagttctttctagaacccgctcttggaatcgccttcacctgttcttggagtattattattgtccgaacggctccttgtcggggtttggggtaggatttagacgcgcaaataaatgtcccgatcacccacgtagtgggacatctgagttgagacccagttgttactaaccttattgtgaattgcctgatctacaagagaggtgagagaccgttgtgtcttgagatcaaagacccaagccttaccctaccctgtgaggagagaagaggggctaggctccctggagttctgaatagcactttgaattgagcagggcacatggtgttggccactgctgtaatcctgcctcttactgaccgctgtcttccttctcctccacaggcggctcctgcacctgctccagctcctgcggctgcaagaactgcaaatgcacctcctgcaagaagagtgagttgggaccctcgggtggtggtgggggaactcctacagagctggctctgagaaacgtctgaggccattcggtttggggcaagaagcaggtcttctgccagacctgtgcgaccggaggactaggaagcctactctgacatcttcctctatctttctttccaggctgctgctcctgctgccccgtgggctgctccaaatgtgcccagggctgtgtctgcaaaggtgcctcggacaagtgcacgtgctgtgcctgaagtgacgaacagtgctgctgccctcaggtgtaaataatttccggaccaactcagagtcttgccgtacacctccacccagtttactaaaccccgttttctaccgagcatgtgaataataaaagcctgtttattctaactctggttttcttggtgtcgtttagaaataagaaactggggcgacacgggttaacttgatagtctggggatctggttttggactcgcccgtgccttttaactcccgcctctggctcccaaagaggggtaataatgtctttgggtaaagccaagttatcccataagctt

SEQ ID NO: 804 - DNA, 3197 bp, Rattus norvegicus
  Genbank Accession No. M13101
gaattcaaggcccatactgaacatggtaaaagccatatacagcaaaccagttgctaacattaaactaaatggagagaaacttgaagcaatcccactaaaatcagggactagacaaggctgcccactctctccctacttattcaatatagttcttgaagttctagccagagcaatcagacaacaaaaggatgtcaaggggatacagatcgctaaagaagaagtcaaaatatcactatttgcagatgatatgatagtatatttaagtgatcccaaaagttccacgagagaactactaaagctgataaacaacttcagcaaagtggctgggtataaaattaactcaaataaatcagttgccttcctctatacaaaagagaaacaagccaagaaagaaattagggaaacgacacccttcataatagacccaaataatataaagtacctcggagtgactttaacaaagcaagtaaaagatctgtacaataagaacttcaagacactgaagaaggaaattgaagaagacctcagaagatggaaagatctcccatgctcatggattggcaggattaatatagtaaaaatggccattttaccaaaagcaatcttcagattcaatgcaatccccatcaaaataccaatccaattcttcaaagagttagacagaacaatttacaaattcatctggaataacaaaaaacccaggatagctaaaggtatcctcaacaatgaaaggacttcagggggaatcactatccctgaactcaagcagtattacagagcaatagtgataaaaactgcatggtattggtacagagacagacagatagaccaatggaatagaattgaagacccagaaatgaacccacacacatatggtcacttgatttttcacaaaggagccaaaaccatccaatggaaaaaagatagcattttcagcaaatggtgctggttcaactggaggtcaacatgtagaagaatgcagatcgatccatgcttatcaccctgtacaaagcttaagtccaagtggatcaaggacctccacatcaaaccagacacacccaaactaatagaagaaaaactagggacgcatctggaacacatgagcactggaaaaaatttcctgaacaaaacaccaatggcttacgctctaagatcaagaattgacaaatgggatctcataaaactgcaaagcttctgtaaggcaaaggacactgtggttaggacaaaacggcaaccaacagattgggaaaagatctttaccaatcctacaacagatagaggccttatatccaaaatatacaaagaactcaagaagttagaccgcagggaaacaaataaccctattaaaaaatggggctcagagctaaacaaagaattcacagctgaggaatgccgaatggcggagaaacacctaaagaaatgttcaacatctttagtcataagggaaatgcaaatcaaaacaaccctgagatttcacctcacaccagtgagaatggctaagatcaaaaactcaggggacaacagatgctggcgaggatgtggagaaagaggaacactcctccattgttggtgggattgcaaactggtacaaccattctggaaatcagtctggaggatcctcagaaaattggacattgaactgcctgaggatccagctatacctctcttgggcatatacccaaaagatgccccaacatataaaaaagacacgtgctccactatgttcattgcagccttatttataatagccagaagctggaaagaacccagatgcccttcaacagaggaatggatacagaaaatgtggtacatctacacaatggaatattactcagctatcaaaaacaacgactttatgaaattcgtaggcaaatggctggaactggaaaatatcatcctgagtgagctaacccaaacacagaaagacatacatggtatgtactcactgatatgtggctattagccaaatgcttgaattaccctaaatgcctagaacaaatgaaactcaagacagatgatcaaaatgtgaatggttcactccttctttaaaaggggaacaagaatacccttggcagggaagagagaggcaaagattaaaacagagactgaaggaacacccattcagagtctgccccacatgtggcccatgcatatacagccatccaattagacaagatggatgaagcaaagaagtgcaggctgacaggagccggatgtagatcgctcctgagagacacagccagaatatagcaaatacagaggcgaataccagcagcaaaccactgaactgagaataggacccccgttgaaggaatcagagaaagaactggaagagcttgaaggggctcgagaccccatatgtacaacaatgccaagcaaccatagcttccagggactaagccactacctaaagactatacatggactgaccctggactctgacctcataggtagcaatgaatatcctagtaagagcaccagtggaagcggaacgcctgggtcctgctaagactgaacccccagtgaactagactgttgcggggagggggacaatggggggagggtggggaggggaacaccgataagaaacaggggggggagggggatgtttgcccggaaactgggaaagggaataacactcgaaatcgtatataagaaatactcaagttaataaaaataaaataaaataaaataaaaaaggagcattcaactcataaataatttttgttctgaaaaatatttttaattgttatcagttatgagacagcttttcagaagattgtgtgtgtgtgtgtgtgtgtgtgtgtgtgtgtactacagcatgttttatatttagttatcaatccttgaagaatgatttagttttaaattaaatttaaatataatactagactctgttagatacgaaaggtaaatttctattttggttccctttactcccatgtctagtgtttctagatggaaaatattgtgatcctgctgtcttatagatttaacttaagaatgtttacattttattttcaactagattggcaattcaaagcctggtcttagaagttattttaaagtatgttcttagtgtaagtcaatttttaagctagttgtagttcatttaatttcctcacaagagttatttttgtgtgtggtatatttctcttttgttaggtgatttttgctgttatacttaccttgaattc

SEQ ID NO: 805 - DNA, 1346 bp, Rattus norvegicus
  Genbank Accession No. M15481
gaattccgggagacaaccttgtcaagcacctaattgtgccatccgtgcgatgccagccagctccatccaccttacaggagtgaagtcagcgttcatatacgctgtgtggtctggcagctgagatagtgtttcccaaagggactgtggaatgttacctcagcaggcattcatttcgcgtttggaaaatcgtctccaaatgaactttctttccgtgctgggtctgcagaacatttcagaagcggagctagcaatctgcttcaactttttttcccccggtgcttgcagcaggagatgcctgaagggagctgctgcgtggtggtctgaaacatagttcaaggaatagaggtcaactgcctagagcggtgcaggcagggcacaggctggctttgtactctgagtctcaaggtatttcccagtgcctgagccagggggaaggtggggggaggaagggaaggagctgccacttggatcgctattctgggtagccaagacagatagccatacaatggaaattagtggcttcaacttgggggaaaggatggactctaacttcgagctgtgcagttcgcccattgtttgaatggacaaaaggcagtttacccaggctcctagcatacctgcctgggtgtccaaatgtaactagatgctttcacaaaccccacccacaaaacaacacatgttcttaagtcctgggctttgttttcacttcggcctcataatacccactctgacctgctgtgtaaacgacccgggacgtaccaaaatgagcgcacctccaataaagatacacatcatgtcgtcttcacatctcttctacctggcactctgcttgctcacctttaccagctcggccacagccggaccagagaccctttgcggggctgagctggtggacgctcttcagttcgtgtgtggaccaaggggcttttacttcaacaagcccacaggctatggctccagcattcggagggcaccacagacgggcattgtggatgagtgttgcttccggagctgtgatctgaggaggctggagatgtactgtgtccgctgcaagcctacaaagtcagctcgttccatccgggcccagcgccacactgacatgcccaagactcagaaggaagtacacttgaagaacacaagtagaggaagtgcaggaaacaagacctacagaatgtaggaggagcctcccgaggaacagaaaatgccacgtcaccgcaagatcctttgctgcttgagcaacctgcaaaacatcggaacacctgccaaatatcaataatgagttcaataccatttcagagatgggcatttccctcaatgaaatacacaagtaaacattcccggaattc

SEQ ID NO: 806 - DNA, 668 bp, Rattus norvegicus
  Genbank Accession No. M18854
aggatctgaaaacggtgactccacccaaggtctccttgtttgagccatcagaagcagagattgcagacaaacaaaaggctaccctcgtgtgcttggccaggggcaacaaccctgaccatgtggagctgagctggtgggtgaatggaggagatccgcatggggtcagcacagaccctcaggcctacaaggaaagcaacaatatcacctactgcctgagcagccgcctgagggtttctgctaccttctggcacaatcctcgcaaccacttccgctgccaagtgcagttctatgggcttacagaggaagacaactggtcagaggactcacccaaacctgtcacacagaacatcagtgcggaggcctggggccgagcagattgtgggattacctcagcatcctatcaacaaggggtcctgtctgccaccatcctctatgagatcctactggggaaggccaccctgtatgctgtgctagtcagtgccctggtgctgatggccatggtcaagaaaaaaaattcctgagacaaactttatgcatcctgagctgttctttaccctggccatggattttcccgcaccttctccaatccctgttcctaaggacttgtctcctctccctccatggaaatctaccattcctcattaaccccttgactatgaaacagactg

SEQ ID NO: 807 - DNA, 2176 bp, Rattus norvegicus
  Genbank Accession No. M19648
atgctgctcctcctggccagtctcgggttgttggaggatataaatgtgagaagaattcccaaccctggcaagtggctgtcatcaacagatacctctgcgggggtgtcctgatagaccccagctgggtgatcacggctgcccactgctatagccagtgagtaagggaggggacaggaatgactccaggacaggctgtggtactgaatggcaggagagtgggacgggctcaaagtctaaagaggtccagcggggctaactggcctatccatgacctcctgggtctctttgctcctctctccaggcttgtgttcatgttctggttctttcttttctgccttgttgttcatatgtctcctgccttcattcacatctgaatgtctctgtggccatctgtcactctgtgtctcctcccccggtcttggtccatctcagtctgggtctgggtctcatgtgttctcttttattactactgacaatactggagaacaggcctaaaggacactaggatacaaagtcatgtccctgaatgtagggtgtccctgaatgtagggtgtgagagaagtcctcactctcatcagagaagcttgcctttaggatcttctgtccattcacaggacacagggaagggctggtcagagctggatctgggtgaggtaactgagtacagagggagagcaggatgtggcagtggggtaggggagttagggaaggggagctcagacttgggctgtgggccaggccttccccactggagaagttcagcccagttccatctgcacctgaacagctctcaagtcctcctcctcctccctgtcccctcttcccttgtctttgtatctgtctctctgtctctaaatgtgtttgtatgtgtgtgtgtgactgtctctgtgtgtgtatgagactttctgtgtgcatgtgtgtgtgtgtgtgtgtgtgtgtgtgagtttctgtctgactctcttctttcctccctccctccccaccccctttccctgtactctgcccaatctccctggttgcctcttctcattcaatccatctccttcactgccctcagcaattaccatgttttgctgggccgaaacaacctatttaaagatgaaccctttgcacagtaccgggttgtcaaccaaagcttccctcaccctgactacaacccattcttcatgaagaaccacaccctatttcctggggatgaccacagcaatgacctgatgctgctgcacctcagtgagcctgcggacatcacagatggggtgaaggtcatcgatctgcccactgaggagcccaaggtggggagcacctgccttgcctcaggttggagcagtaccaaaccccttgagtgtaagtctaatctaggaaacacagctgggtgtgagggggaggcagaaaggacctggctggggtctgctcaccaccctcttgtctcctggtccacaggggaattccctgatgatctccagtgtgtgaacatcaatattctctctaatgagaagtgcatcaaagcccacacacagatggtgacagatgtcatgctgtgtgcaggagagttggaaggaggcaaagacacttgcaatgtgagacagcccctccctgcagagaggtgaagggatgagagagggaattgagattctcgattcccacttccacaccctgtctaagcagatgcttcacttccttccttatggaagtgatgtgagttgggaggggaggagctgcagctggtactattcctccttttgacttggattcagggactggcctgtccaccctttactcccctgaagagatggcctcccaagagctgggttcccttccctactggccagagctgcctcttagagtctccctgtgtcttccccctgaagtcagttccaggttttcaagtagaacccaactgccaactccttcttattcctgtccctctccttctttcagggtgactcaggaggccccctcctctgtgatggtgtgcttcaaggcatcacgtcctggagctctgtcccatgtggcgaaaccaataggccagctatctacaccaaacttattaagttcacctcctggataaaagaagttatgaaggaaaactcctgagtgtcatactgtgccctggtctcaataaaacccaccatgcagcacacatgttcaagttctgattctctctcgacttctggag

SEQ ID NO: 808 - DNA, 3327 bp, Rattus norvegicus
  Genbank Accession No. M22631
aacggcgggatataacatgagctgtcttcggtatcgtcgtatcccactaccgagatatccgcaccaacgcgcagcccggactcggtaatggcgcattggccccagcgccatctgatcgttggcaaccagcatcgcagtgggaacgatgccctcattcagcaatttgcatggtttgttgaaaaccggacatggcactccagtcgccttcccgttccgctatcggctgaatttgattgcgagtgagatatttatgccagccagccagacgcagacgcgccgagacagaacttaatgggcccgctaacagcgcgatttgctggtgacccaatgcgaccagatgctccacgccccgtcgcgtaccgtcttcatgggagaaaataatactgttgatgggtgtctggtcagagacatcaagaaataacgccggaacattagtgcaggcagcttccacagcaatggcatcctggtcatccagcggatagttaatgatcagcccactgacgcgttgcgcgagaagattgtgcaccgccgctttacaggcttcgacgccgcttcgttctaccatcgacaccaccacgctggcacccagttgatcggcgcgagatttaatcgccgcgacaatttgcgacggcgcagtgcagggccagactggaggtggcaacgccaatcagcaacgactgtttgcccgccagttgttgtgccacgcggttgggaatgtaattcagctccgccatcgccgcttccactttttcccgcgttttcgcagaaacgtggctggcctggttcaccacgcgggaaacggtctgataagagacaccggcatactctgcgacatcgtataacgttactggtttcacattcaccaccctgaattgactctcttccgggcgctatcatgccataccgcgaaaggttttgcgccattcgatggtgtcggaattccgggcggtcctcccagcaactgctgtggacgctgaagcgtgctccagtctattcacagcaatgcctagtggtgtcccgaagtctcagttctgtggaatatgagcctaaagaaaaaacttttgataaaattcttattgctaacagaggagaaattgcttgtagggtcattaagacttgcaggaagatgggcatcaggacagttgccatccacagtgatgttgatgccagctcggttcatgtgaaaatggcggatgaggctgtctgtgttggcccagctcccaccagtaaaagctacctcaacatggatgccatcatggaggccattaagaaaaccggggcccaagctgtacacccaggttatggattcctgtcagaaaacaaagagtttgcaaagtgtttggcagcagaagatgtcactttcattggacctgatactcatgctattcaagccatgggtgacaagatagaaagcaaactgttagccaagagagcaaaggtcaacacaatccctggttttgatggggtactaaaggatgcagatgaagccgtcagaattgcaagggaaattggctaccctgtgatgatcaaggcctcagcaggcggtggtgggaaaggcatgcgcatcccgtgggatgacgaagagaccagggatggctttagattttcatcccaggaagctgcttctagttttggtgatgatagactactaatagaaaaatttatcgataaccctcgtcatatagaaatccaggttttaggggataaacatggcaatgctctgtggctcaatgagagggagtgctcgatccagagaagaaaccagaaggtggtagaggaggcgccgagcatttttctggatcctgagacgcgccgagccatgggagagcaggccgtggcttggccaaaagcggtgaagtattcttctgctggaactgtggaatttcttgtggactcccagaagaatttttacttcttggagatgaatacaagactccaggttgaacatcctgtcacagagtgcattactggcctggacttagtccaagaaatgatcctggttgctaagggttacccactcaggcacaagcaagaggatattcccatcagtggctgggcagttgaatgtcgggtttatgctgaggacccctacaagtctttcggtttaccgtctattgggagactgtctcagtaccaagagcctatacatctacctggtgtccgagttgacagtggcatccaaccaggaagtgacatcagcatctatcatgaccctatgatttcaaaactagtcacatatggatctgacagagcagaagccctgaagaggatggaagatgcattggacagttatgttatccggggtgttacacacaacatcccactgcttcgggaggtgataatcaacacgcgttttgtgaaaggggacatcagcactaagtttctctctgatgtgtatcctgatggcttcaaagggcacatgttaacacccagtgagagagaccagttattggctattgcatcatccttgtttgtggcatcccagctacgagcacagcgctttcaagaacattcaagagttccagttataaggccagatgtggctaagtgggagctctcagtaaaattacatgatgaagaccatactgttgtggcatccaacaacgggccaacatttaacgtggaagttgatggctcgaaactaaatgtgaccagtacgtggaacctggcctcacccttattgtctgtcaacgttgatggcactcagaggactgtgcagtgtctttctccggacgcaggtggaaacatgagcatccagtttcttggcacagtgtacaaagtgcacattttaaccaaacttgctgcagaactgaacaaattcatgcttgaaaaagtacccaaggacactagcagcgttctgcgttccccgaagcctggagtggtggtggccgtttccgtcaagcctggagacatggtagcagaaggtcaggaaatctgtgtgattgaagctatgaaaatgcagaacagtatgacagctggtaaaatgggcaaggtgaaactggtgcactgcaaagctggagacacagttggtgaaggagacctgctcgtggagctggaataagtacttgtagcccttcagtcaccactgctcactgctttaattagcatttccattattctctaaccctcaatttgctcaggcgtttacaggagcactctgcagcaggttctacagcatcgtatttattccttagaagagggcaaaaccgacactctgccaaaaaaatcaccaatgggaatttttattgatataaatacttgtacatatgatttgtacttctgctgagatttcccagtgtcaaaattaaatcaataaaaccaacggaa

SEQ ID NO: 809 - DNA, 58 bp, Rattus norvegicus
  Genbank Accession No. M22922
acacgtggtaccatgtggctccagatcctgttcctcgtcctgtccgtgggacgaattg

SEQ ID NO: 810 - DNA, 1113 bp, Rattus norvegicus
  Genbank Accession No. M34097
cataagatgtatgtgtagggggtgtaagagtactcgtgaggggtgtgggcagtgttatagggtgctggtgagcaaaccctctgggacctaggtggccttccagggaagatgaagctcctcttgctcctgctgagcttctctctggcccccaagacagaggcaggggagatcatcgggggacatgaagccaagccccactctcgaccctacatggcctatcttcagatcatggatgagtattctgggagtaagaagtgtggcggcttccttatacgagaagactttgtgctgactgctgctcactgttcgggaagcaaaataaatgtcacgttgggggcccacaacatcaaagaacaggagaagatgcaacaaatcatccctgtggtgaaaatcattccccacccagcgtataattctaagacaatctccaatgacatcatgctgttaaagctgaagagtaaggccaagaggtctagcgctgtgaagcctctcaatctgcccagacgcaacgtcaaagtgaaaccaggagatgtgtgctatgtggctggttggggaaagctgggcccaatgggcaaatactcagacacactacaagaggttgagctaacagtacaggaggatcagaagtgtgagtcctacttaaaaaattatttcgacaaagccaatgagatatgtgcaggggacccaaagatcaaacgtgcttcctttcggggggactctggagggcctcttgtgtgtaaaaaagtggccgcgggcatcgtctcctatggacaaaatgatggttcaactccacgggcattcaccaaagtctcgactttcctatcatggataaagaaaactatgaaaaagagctaactacaagaagcaacatggatcatttcctgactaaccatctgccctatagctgagtccaggattgctctaggacagatggcagcaactgaataaagcactttttttctgagactggttgactggtttcatgtccattcacagtgatcaaccctgtccttggcagatgaatggaatgcttctgccacaaggctgtgacaacccagctgacatctgctagttcaccctctctacaagagaagaagaatgtttgattgtccg

SEQ ID NO: 811 - DNA, 1157 bp, Rattus norvegicus
  Genbank Accession No. M36410
ggcaggctaggttgcgctgtctgcgtgctgaccggggcttcccggggcttcggccgcgccctggccccgcagctggccgggttgctgtcgcccggttcggtgttgcttctaagcgcacgcagtgactcgatgctgcggcaactgaaggaggagctctgtacgcagcagccgggcctgcaagtggtgctggcagccgccgatttgggcaccgagtccggcgtgcaacagttgctgagcgcggtgcgcgagctccctaggcccgagaggctgcagcgcctcctgctcatcaacaatgcaggcactcttggggatgtttccaaaggcttcctgaacatcaatgacctagctgaggtgaacaactactgggccctgaacctaacctccatgctctgcttgaccaccggcaccttgaatgccttctccaatagccctggcctgagcaagactgtagttaacatctcatctctgtgtgccctgcagcctttcaagggctggggactctactgtgcagggaaggctgcccgagacatgttataccaggtcctggctgttgaggaacccagtgtgagggtgctgagctatgccccaggtcccctggacaccaacatgcagcagttggcccgggaaacctccatggacccagagttgaggagcagactgcagaagttgaattctgagggggagctggtggactgtgggacttcagcccagaaactgctgagcttgctgcaaagggacaccttccaatctggagcccacgtggacttctatgacatttaagcccatgtcctgtcacagcgccccccccccccagccctgcctaacacacatacaagccctccaacccagccagcgggagccacgggcactgccagtcctgagaaggcttctgcagaggctcgggagagagctgatgtgtactggagtcctctgtccccaggaagagaacttagggctgggagagcaggagaagcagaaacactgagcagatgaggcagagtctctcgtctgtggtcgttctcaggtgaagagggcggggtctgattcacagagaggaccgagggtattgaatctttgttgtactgccttcatcctggggtattcactggtcctccctcgactctggtcaaatacatggttatggcagatgccctaga

SEQ ID NO: 812 - DNA, 4400 bp, Rattus norvegicus
  Genbank Accession No. M59814
gtatagtttcgtgtgaggggtttccagccccaagaatgccagctatgaaactagcagggtcgcccacccacaactccccctccatctttttatggtttggctcgctctccctcaccctctctcacacacgcacgcacacacccacctctcccataaacacacacacacacatgcacacccacatccacgcgcgcccgcaccgccccacgcgcgcacactcccgcccacgcccacgccgcgctccggggagtccggtcccggccagagcgcgaaaggacacggagaagccacccgccgggagcgcagcggcgccctgggacgcggcgcgtctccgctggggctcggcctgggggccgctggccggcgatggccctggattgcctgctgctgttcctcctggcatctgcagtggccgcgatggaagaaacattgatggacacaaggactgccactgcagagttgggatggacggccaaccctgcctctgggtgggaagaagtcagtggctacgatgaaaacctgaacaccatccgtacttaccaagtgtgcaacgtctttgaacccaaccagaacaactggctgcttaccacctttatcaacagacggggcgcccatcgcatctatacagagatgcgcttcactgtgagggactgcagcagccttccaaatgtcccaggctcctgcaaagagaccttcaacttatactactatgagactgactctgtcattgccaccaagaagtcagccttctggtctgaagccccctacctcaaagttgacaccattgctgcagatgagagcttctcccaggtggattttgggggaaggttgatgaaggtcaacacagaagtcaggagctttgggcctcttactaggaatggtttttacctcgctttccaggattatggagcctgtatgtctctactttctgtccgtgtcttcttcaaaaagtgtcccagcattgtgcaaaattttgcagtgttcccagaaaccatgacaggagcagagagcacatctctggtgattgctcggggcacatgcatccctaatgcagaagaagtggatgtgcccataaaactctactgcaatggagatggagagtggatggtgcccattgggcgctgcacctgtaaggctggctatgaacctgagaacagcgtggcctgcaaggcctgtcctgcgggaaccttcaaggccagccaggaagctgaaggctgctcccactgcccctccaacagccgctccccttcagaggcgtctcccatctgcacctgccggactggctattaccgagcagactttgatcccccagaagtggcgtgcactagtgtcccatcaggccctcgaaatgtcatctccattgtgaatgagacatctatcattctagagtggcaccctccaagagagaccggtgggcgagatgatgtgacctacaacatcatctgcaagaagtgcagagcagaccgccggagttgctcccgctgcgatgacaatgtggagtttgtacccagacagctgggcttgactgagtgtcgtgtctctatcagtagcctatgggcccacaccccatacacttttgatatccaggccatcaatggagtctctagcaagagtcccttccccccacagcatgtctctgtcaacatcaccacaaaccaagctgccccctccactgttcctatcatgcaccaggtcagtgccaccatgaggagcatcaccttgtcatggcctcagccggagcagcctaatggcatcatcctggactatgagatccggtactatgagaaggagcacaatgagttcaactcttccatggccaggagccagaccaacacggcacgtatcgatgggctacggcccggcatggtgtatgtggtccaggtacgagctcgaaccgtggctggctatggcaagttcagtggcaagatgtgcttccagactctgacagatgatgattacaagtcggagctgagagagcagctacccctgatcgctggctctgcagcagctggggttgtatttgttgtgtctctggtggctatctccattgtctgcagcaggaaacgagcttacagcaaagaggctgtgtacagtgataaacttcagcattacagcacaggccgaggctccccagggatgaagatctacattgacccgttcacttatgaggaccctaatgaagctgtccgggagtttgccaaggagattgatgtgtcttttgtgaaaattgaagaggtcatcggagcaggggagtttggagaagtgtacaagggccgattgaagctgccaggcaagagggaaatctatgtggccatcaagaccctgaaagctgggtactcagagaaacagcgtcgggattttctgagcgaggcgagcatcatgggccagtttgaccatcccaacatcattcgcctagagggtgttgtcaccaagagccgacctgtcatgatcattacggagttcatggagaatggcgctttagactctttcctccggcaaaatgacggacagttcaccgtgatccagcttgtggggatgctgaggggcatcgctgctggcatgaagtacctatctgagatgaattatgtgcaccgggacctggctgctaggaacattctggtgaacagcaacctggtgtgcaaagtgtctgactttggcctctctcgctacctccaggatgacacctcagaccccacctacaccagctccttgggagggaagatacctgttagatggacagctccagaggccatcgcctaccgcaagtttacgtcagccagcgatgtctggagctacgggattgtcatgtgggaagtaatgtcatttggagagagaccttactgggatatgtccaatcaagatgtcatcaatgccattgagcaggactaccggctgccccctcctatggactgcccagctgccctgcaccagctcatgctggactgttggcagaaggatcgaaatagccggccccgttttgcagagatcgtcaacaccctggacaagatgatccggaacccagctagtctcaagactgtggcaaccatcaccgctgtgccttcccaacccctgcttgaccgctctatcccagacttcacggcctttaccaccgtggatgactggctaagtgccatcaaaatggtccagtacagggacagcttcctcaccgctggcttcacctccctccagctggtcacccagatgacatcagaagacctcctgagaataggggtcaccttggcaggccatcagaagaagattcttagcagcatccactcgatgagggtccagatgaaccagtcaccgtcggtaatggcatgagaactcgatgttcctaggggaggagaggaatgaaaaggaccagggtcaaaggggaaacagaggttgaccacggtggaatgtgccagaaagatcagcttcttggctgagaaacaacttcccacctgtgaagaatgaactggacctgctgcccatgggcaaccgccatttctcggccatggaagtgtgtagaagccgtgggaaaccaaacgcgtaatgattgacgataaagacagagaaaggtgatgctaaacagaagcgaagctgaaaccgtatgcgttgggaaccagggtgaactcagttcccatctgagagggactggagttccccgtctgcaggaagaaaggaaggaggtggagggaagagagggaagccctgggctgtgccatgctctccctcgccaatgacattcttttctttcctccattcgtactcctccctcagagcccctcctccctcccccacatccatttcccttgctcatgactcatgtagggaagtttcttcaaaataaaacccagctcctgagtcaaaacctggtctgagggagagcggttctccatccctcggtcccagagaacagagtgatatttaaaatgccatcgatggtgaggttattggaagaggaaggaccgttagcacacaccatcatggtaaataagtggagcctaagtgtcagcagacatgatgaaagccaagtcaccttgaaggtgacttttctgggaaggtcttaagcatgtaatgtcccttaataggagggaaagggacaatctcagggcagccttgtccaggtagaaatattttgcccccctgtctgttgttggtgaggggtcacaccagccagggagacctctgggaagaagctgccacacacaaggactctggaaggatccacatgtgagcccagccagggtcatacggttcccaacctgaggaaaaggtttttcacacactccttgctttctgctgagataagaaaggtgtcactctgcagagtgtgactttttacaggttaaataaagctgtatatgtctcattgttaaaaaaaaaaaaaaaaaaaaaaaaaaaaaaaaaaaaaaaaa

SEQ ID NO: 813 - DNA, 1675 bp, Rattus norvegicus
  Genbank Accession No. M60666
cgcgctcggtctcctctggctcctctgcctaagggcccctcgccaccgccaccatggacgccatcaagaagaagatgcagatgctgaagctcgacaaagagaacgccttggatcgagcagagcaggcggaggctgacaagaaggctgcggaagaccggagcaagcagctggaagatgagctggtgtcactgcaaaagaaactcaagggcactgaagatgaactggacaaatactccgaggctctcaaagatgcccaggagaaactggagctggcggagaaaaaggccacagatgctgaagctgacgtagcatctctgaacagacgcatccagctggttgaggaggagttggatcgcgctcaggagcgtctggccacagctctacagaagctggaggaggctgagaaggctgcagatgagagtgagagaggcatgaaagtcattgaaagccgagcccaaaaagatgaagaaaagatggagattcaggagatccagctgaaagaggccaagcacattgctgaagatgctgaccgaaagtatgaagaggtggcccgtaagctggtcatcatcgagagcgatctggagcgtgcggaggagagggctgagctctcggaaggcaaatgtgccgagcttgaagaagagttgaaaacggtgacgaacaacttgaagtcactggaggctcaggctgagaagtactctcagaaagaagacaagtatgaagaggagatcaaggttctctctgacaagctgaaggaggctgagacccgggctgagtttgcagagagatcagtaaccaaattggagaaaagcattgatgacttagaagagaaagtggcacatgccaaagaagaaaaccttagtatgcaccagatgctggaccagactttactggagctaaacaacatgtgaaaccctccttagctgcggccacattctctcgtttccccctgttgttttattttgtctttaaacacatgcttaccatgaaaccccttcaatgctttttttttttatatatatatatacctttaccactgtcactgcaacatctgcagagagccagctagggcagggggtggggaaagacacacagaaagcaggtgtacttgttatttaaatgtgccatttcccaggttgacattgccacacttcacagagtttaggcatgcagtttgcttagccagtgtaggaagcctcacgaaaacaaaaggattaacagcctaagtgccaatggtggggtcatcaggaagactgatgttggagacaatcaggtgcagattggtgctaatttaaacaaaagaacccctggtgtcttttgttcagtctaatacaatttagacttctgtccaacactaatttatttttgtcttgagtagcactgcgagaggatatgggttccatgtgcccgtgttcctcacagccaagggtttgaaagccacgctggtcttgtaagattcccattccttcccagctgacatgcttgtggtcccttccaactcagtggggagagggctcagtgctgttcgccccccccccccccaattctccatgtcagggtaagagatctaggcactacatatgtaattggtaaagaaaaggcattttctcgagagttataactatgtaaacattgtataatgatatgaaataaaatgcacattgtaggacattttcta

SEQ ID NO: 814 - DNA, 3224 bp, Rattus norvegicus
  Genbank Accession No. M83143
ctcaaggggcctctgggttctatttccaaagttctcggtgtgttccgtaatacttacgttacatctctcgggtgtggagctaggaatctccagtaagagagaacatgcgatatttgttgttctggtatggattgcctcactcgtattctcagtgtgtctgtcattggaccccagccagtggcatctttgaaaatgagccattattatctttattgcttctggtcctgggcaagttagtcaccacagaaaagcgcttcctcaaggacagtttgtacaccgaaggaatcctaattgtatgggacccatccgtgtatcatgcagatatcccaaagtggtatcagaaaccagactacaatttcttcgaaacctataagagttaccgaaggctgaaccccagccagccattttatatcctcaagccccagatgccatgggaactgtgggacatcattcaggaaatctctgcagatctgattcagccaaatcccccatcctccggcatgctgggtatcatcatcatgatgacgctgtgtgaccaggtagatatttacgagttcctcccatccaagcgcaagacggacgtgtgctattatcaccaaaagttctttgacagcgcttgcacgatgggtgcctaccacccgctcctcttcgagaagaatatggtgaagcatctcaatgagggaacagatgaagacatttatttgtttgggaaagccaccctttctggcttccggaacattcgttgttgagtacctagccaggcacccttatccttctccatacgtcattttatggctactctcctggttaccgctgcttgaaggagtgtttttattcaacaggcccagcctgcttcctgcgctctagggaattttgttggcaagagttctggggcctccagcctgcctccctggggccaccgaggatgggagtccagattcttgccacactcattcctcctagacagcgtcctcctctccttctgcatgggtagggaaagatccacatttctcaccagggttgcgaaaactagactttgttttctccaactggatgatgtcatcctcgcaaggcagcacgtcctctgtggcttgaactctccctaggtattgatttcacatccgaaagaaattctcccagatcatgatttgtgtttcacagatgcagggtggcgggaggggagaaaaataattggggcaggatggggaagcctactcagttactccagaagggcgtcaaggtgctcccaactcccttgggacatagtcctgttgtcaccctgtctggctaggctgatccttaatgcaaaggaccctgggtgcttatgatttgggtagcccacttccaactccctgtggagatgaaaggtacaaaacctcctgatcacctgaccatctgtctccagcatggacgagagagacacccaacaggcagctaaaatgcaaacattccgtagcctgttgtctgtgtgctcctccctaagacacccaggaggggccagctctactgtgttcttgtagagctgcggcacggaggaagaagggatactggggaagctcttacaccttctgcgtcagaagatctcttttcattttcccctttatgaacactgtatggcctgttacattgatgttatatttggaggcccaaggagtttttgttaggaagtccctaccaccgtcagatgtagacagcaggttaaagtgctgccccacaagactggggttcttattttattttttttaaatgtctacctctcccctactaattgctattgttatcccaaaccttctccagcaggctcccctctcgaattttaatctttttctttaggggcaccccatcaactttccctgaccgtttgacaaatacccgaaaggtctctcagggcatggggagtatgtaataaatgattcttcccttagaatcttaatcattcctgggacttaggggggtgaagtgtgtgatcacagattgccaagcatacccaccctgtttggctctgggcaggaagcactgctcttcctggttccctcacaaggattttctgagatgtggagtggtttacctagcctctgatgaagccacagtgggcttctctaccaggtggcaataacctatggtcaaaactcaaggctggcacaatctgttcgattcaaggctactaagacttaatgctattgaacctgtgttctcacaggcttctgtttactgctgacctagagctcagaaactcagaccccactgtctcagtgtttcaagctgcttgccttattcgggcaatagaaagcccggagtgaaaagccctgggtttccaggttgacctctcacttcctcactgtgccactttgtttctgtatctgtaaaatgggggtgacaatcctacctcacagggctgtgtggggacaacaggaaaacatggctgcgatgtatgagaaccactggaaagcgcgtggctgggctgtgaccacagtgtataggaagtaggtaccctgctgtccttcctgtttccttatgaagaacctaccaggtgatcacacccgtgctgggccttgctacaagggagggcagtggagaggaacaggacattctttctgttgtgagacaactgcatcatttgcaatatgcaggggcctactatcttgttgcctgcaccccaggtctatttgtgctggggttgggggtgcacagagcattgagctgcttggccgctgtgtggaataaatctagagaattcctggctcacttcttctgatctcacacgctcattataaggcattaggactgtggatggagtggccaggaagttgatgttccttctgtcagcaagaggtacattagagatggagactacactgggtagattctagtttttaattcttattaatgtggggggaataaattaataagtataatatgattctgatgtctattagactttctctgtgctctttgtgagtaaggtgggccacggaggtatgagggcatcactgttagtttggtgaggtggttagtgactgatgtacaggaagtgtcttctacgtgggcactgacgtcagtagccatctatgcatcctaaatgcaggatcctcttgattctttctgccaatcaaatatatcgttgctcttggttcaggtttgtgtcagaaactttaaaaacatacctattaattctaaattatccaaagattatgtacaaattttaaaataaatgtctttttcag

SEQ ID NO: 815 - DNA, 949 bp, Rattus norvegicus
  Genbank Accession No. M83740
gaattccggttttatagcaaggacattacattttcaggtacctaaagtcaaaattcaacacactgatataaaacttctatttaaaccaatagggttctgttatgatattgatctgttcacagtaacatttacaaaaagaggcagaggcagggggatctctgccccgcccccgcggtggcctgctgcctgccagccgctctccctcgctgacgccacctgcttcccgcactggacatggctggcaaggcacacaggctgagtgctgaggaacgggaccagctgctgccaaacctgcgggccgtggggtggaatgaactggaaggccgagatgccatcttcaaacagttccattttaaagacttcaacagggcttttggcttcatgacaagagtcgccctgcaggctgaaaagctggaccaccatcccgagtggtttaacgtgtacaacaaggtccatatcaccttgagcacccacgaatgtgccggtctttctgaacgggatataaacctggccagcttcatcgaacaagttgccgtgtctatgacatagatctaccctgcctcctatttccttaggggaaaggagaaggagtgactggaggaggaacccagggagggaaccaaggaggctggcccttgctccctgactcttgcggtgaccaccatctccgtcaggaggggtatgagtccctccctgtgcagaacgatgcccatgttcctggtgccagcctcctcactgggctctgccatgtttataatttgaataagctctcccattttctatagagttcctagcctcagttgtgtcccaggctgcctcttgctccttgtctaccggttctagttaattttccaagtagctgtgataaagcatgacagaaagtccaattcagaccctactaaaacaaaccccaatatattatggaaacagtgcttttatgccggaattc

SEQ ID NO: 816 - DNA, 1314 bp, Rattus norvegicus
  Genbank Accession No. M84648
gaattccactctgcttcctcatgtgtctggattccgtactggagtcactgtgaggttaaaatataaataagggaagcattttctagaataccccaatgcttggagagcttccttttctttctttcctccaaatattcttaaagggatctggattctcctcggtgtcatgcagattctctctcaggtcccagttctgacagtgtaaatctttgggtccaagcccactcccaccgccttccctgtccccactgtggaacacagaccactccataccctagcctgtggcaactacctctgctgacagccattttgtcttcaactgcctagacccagtcctttcccaggttacccatacgcaatctcacactgactctgttcttcgtccccactggtccaaattggcagccttcctccaaagcaagcgcttagtgctctgagggtttttcccttgtgccttctcaatgatacttccttggctctcctttatgctccaatgaaaatgtcagccttggatttcccgaagttaatcaaaatcgcattcactattttgtctccggtatcacaagtgtcaatgggttgggaatgaaggctagcaggtgggctctgcccattgtctggctctagagaccccatgaaatgctggcaatttaaaggctctggacagagggaaggttcttcaataggacagcctttttcttttttttttttttttttttttcttcttttttttttttcggggctggggatcgaacccaggaccttgtgcttcctaggcaagcgctctaccactgagccaaatccccaaccccaggacagcctttttctgatacaggggttggagttatgaatcacttagtggggctaacaacatgaaactgggactatgtgtgaaagcatagatggtagggctatacggtaagaaaaagccgtgatggcttgttgtgaatcagtctcactgggtgagctttcttaagagcccaaagaagggcttcatgccaacccccatgtgtgtgtgccttctctggacttccttgacctttataccatcagaaattaatgtttaaccagaaaacaaggtttaaatgcaaggacagagaaatgcatcagttccaagctgtagtttgcagagctggactgagtggacctgtgaagaatccaaattccaaacaagtaagtagtatgttttgtcagacgataattgctgaaaaggcaccatttctattgtgtctcttgtgccctccatattactgaatgtgtgctgaaaggacgctctcctgagaatggggattattgatgacaaattatttcctctgt

SEQ ID NO: 817 - DNA, 2257 bp, Rattus norvegicus
  Genbank Accession No. M85183
ggcacttaccgcttcgtgaaagagaatgagacgctgtacgcactgtgctttgtgccgtttgtgtgctggatcgtgtgcaccgtgctgctgcagcaaatggagctgggccgggatctgtctcgtacctccaagaccactacatctgtgtacctgctcttcatcaccagcatgctgaagtctgcaggtaccaatggaccccgggttcagggagagctgcgaatgctgtgccgcctggcccgggagggcatcctgaagcatcaagcacagttctcagaaaaggacctggagagattgaagcttaagcttcagggttcccaagttcagacaatgtttctcagcaagaaggagctgccaggagtgctagaaactgtggtcacctaccagttcattgaccagagcttccaggagttcttggctgcattgtcatacctactagacgctgagggagccccagggaactccgcaggaagtgtgcagatgctcctgaactctgacgcggggctgcgtggtcatctggcactcaccactagattcctctttggactgctaagtacagagaggattcgtgacattggaaaccattttggctgtgtggtgccagggcgtgtgaaacaggacaccttgcggtgggtacaaggacaaagccaacccaaggtggcgacagtaggagcagaaaagaaggatgagctgaaggacgaggaagcagaggaggaggaggaggaggaagaagaggaggaggaactcaactttggactggagctgttgtactgcctgtatgagacacaagaggatgattttgttcgccaggctctcagcagccttccagagatggtactggagcgagttaggctgacccgcatggaccttgaggttctgagctactgcgtgcagtgctgcccggacggccaggctctgagactggtgagctgtggactggtggcggcaaaggagaagaagaagaagaagaagagcttcatgaaccggctgaagggttctcaaagcaccgggaaacaacccccagcctccttgctgcgtccactctgtgaggcaatgattacccagcaatgtggtctgagtattctgaccttgtcacactgcaaactccctgatgcagtttgtcgagacctttctgaggctctgaaggtagctccttccctaagggagctgggcctcctccagaaccgactcactgaggcaggcctgcgtttactaagccaaggcctggcttggcccaaatgcaaggtgcagacactcaggatacagatgcctggcctccaagaggtgatccactacctggtcattgtgctccagcagagcccagtcctaaccactctggacctcagtggctgtcagctgcctggcactgtggtggaacctctgtgttcagccctgaagcaccctaaatgtggcctaaagaccctcagtctgacttctgtggagctgactgagaatccactgagagagcttcaagctgtgaagacattaaagccagatctggccatcatacattcaaaattgggcacacatcctcagcctctgaagggatgaagcagtgtcttctgagccccggagtccagaacaggatattgctgaagtcaacgttcttctgaatatgtctccccattcaaaagcaagtagatgccagcttctccctccaggcaagtctttcaagccaagaagccacagaagggcaagcaaaagacccaggtagatataggcacttaagagcccctggatatagacctggcacatgtcctgccccggacactcggaggttagtcttccctcagccccataaccgccaatacctccctttctgggcccaccaatctgtcccttgaagataatcccaacagtaacagaagtatttgttgtggtttgccctggagttatctgtattttgatgctacttccactgccccaaggacggctgcctagtctgtactcaggactcgggtgatttcaccagaaccttctccctatttaatttgtaaaataccaatgagggcaggtacaagatagaaggaggcctgtcattggatgagaagaaaggatgggtgggagaaacgtttgaaggaagaggaggagactggactggaaaggagaaagagacaggagggacagagaaagtagccatggcgggacaatgtggaagctgatgttaagattccaataagatcccacgctgtacctttataggttgttatgaatgttcttaagggatggatgtgtatggggctttgtatgtttaggtggg

SEQ ID NO: 818 - DNA, 507 bp, Rattus norvegicus
  Genbank Accession No. M93297
tttagatttatttgtttactttgagtgttttgcctacctgtatgtatgcaccatgtgggtgctgggagtcaaacgcagagctctgggaaagcagcaagtattccagactgctaagccgtctctcccacccctcataattaattctcaacaggcagttgccaaacaaatagaaagaagctattaaaactcctgtttcttttgtagcgtgctcttcaggatcccaatgttgctgctttcatggtggagcccatccagggtgaagcgggtgttatcgttccagatccaggatacctgacgggagttcgagaactttgcacccggcaccaggttgtcccactcactttgcagtgacgccaggctcgcctgcacttgtttggactctgctgacaggctagatgatggattccaaggcttgaggaacatgctaatgcttgcaccttctgaggaacacgctaatgcttgcaccctctgaggaacatgctaaatgcttgcaccttctgaggaaca

SEQ ID NO: 819 - DNA, 2028 bp, Rattus norvegicus
  Genbank Accession No. M95762
ggcagcgaacacaagcgcatccggtagaacggaaagaacaggaattgcagagtgacttcaagtctccatacgatttactacccgggtgacggcagtgactcgacagagtagcggctgcaggtgggatggataacagggtctcgggaacgaccagtaatggagagacaaagccagtgtgtccagtcatggagaaggtggaggaagacggtaccttggaacgggagcaatggaccaacaagatggagttcgtactgtcagtggcgggagagatcattggcttaggcaacgtctggaggtttccctatctctgctacaagaacgggggaggtgccttctttattccctacctcatcttcctatttacctgtggcattcctgtcttcttcctggagacagcgcttggccagtacaccaaccagggaggcatcacagcctggaggaaaatctgtcccatcttcgagggcatcggctatgcctcacagatgatcgtcagccttctcaatgtctactacatcgttgtcctggcctgggccctcttctacctcttcagcagcttcaccactgacctcccctggggtagctgcagccacgagtggaatacagaaaactgtgtggagttccagaaaaccaacaattccctgaatgtgacttctgagaatgccacatcccctgtcatcgagttctgggagaggcgagtcctgaagatctcagatggcatccagcacctggggtccctgcgctgggagctggtcctgtgcctcctgcttgcctggatcatctgctatttctgcatctggaaaggggtcaagtccacaggcaaggtggtgtacttcacagctactttcccttacctcatgctggtggtcctgttgatccgaggagtaacactgcctggagcagcccagggaattcagttttacctgtaccccaacatcacacgtctgtgggatccccaggtgtggatggatgcgggcacccagatcttcttctcctttgccatctgcctggggtgcctcacggccctgggcagctacaacaagtaccacaacaactgctacagggactgcgtcgccctttgcattctcaacagcagcaccagcttcgtggccgggtttgccatcttctccatcctgggcttcatgtctcaggagcagggcgtacccatatctgaggttgctgaatcaggccctggcctggcattcatcgcctaccctcgagctgtggtgatgttacctttctcgcctttgtgggcctgctgtttcttcttcatggtggttctcctgggactagacagccagtttgtgtgtgtagaaagcctcgtgacagcgctggtggacatgtatccccgggtgttccgtaagaagaaccggagggagattctcatcctcatcgtgtctgtcgtctctttcttcatcgggctcattatgctcacagagggcggcatgtacgtgttccagctcttcgactactatgcggccagtggcatgtgtcttctctttgtggccatctttgagtccctctgtgtggcttgggtttacggagccagccgcttctatgacaacattgaagatatgattgggtacaagccgtggcctcttatcaaatactgttggctctttttcacgccagctgtgtgcctggcaaccttcctgttctccctgatcaaatacacgccactgacctacaacaagaagtacacatatccatggtggggggatgccctggggtggctcctagctctgtcctccatggtctgcattcctgcctggagcatctacaagctcaggactctcaagggcccactcagagagagacttcgccagctcgtgtgcccggctgaagaccttccccagaagagccaaccagagctgacttctccagcgacaccgatgacgtccctcctcaggctcacagaactggagtctaactgctagggacgaggcctttgacacacctgcgagtctgtctgtggggacagctacagacacagagggcagaaccacccctccgtgctggggcagagagaca

SEQ ID NO: 820 - DNA, 3047 bp, Rattus norvegicus
  Genbank Accession No. M95791
  misc_feature (1)..(3047): n = a or c or g or t
gtcgacctgcaggtcaacggatcctcaacctgaggcaaccaacagcgctgtgtcgggagccacactgacccagggctttcttagaggtaaatgtaacttttatttgcttgagttaattgtctggaagcttctagcctccgtctgtctgtctgtataatcttatctcagcctagaatgtcttcagcctctgagacttcctgttgaataagctttcgcccttnctagttctttctgatctctggctgnctggttcaactcagctgtttctgctcaaactcctctccagactgactgatccattctggcttctcccagttttctcctgaattgctgtacttggcttcacactaacacgaactctagcaatctgttctaaactattctggttccttctcattctctgactctgatatctctctctctctctctctctctctctctctctctctctctctctctctctctctctctctctctctctcactgtcccagtaaaactatcttcttaactttgttttttctcagcccagctctctcttaagtagcttccctttcttctttcttcttctgacagttagtcatatcctgtgctgtcaactctttctctgattcaccacattgtctgtcactcaattagacgtcactttcaaatccgggtgcttccttctacaaactaactttaccttcattatttgggattaaaggtgggtgctaagcactgagccacaccacaactagaaacaggtatcattgtctagaacagacttggcaaggccaaaccgatgctggaactgctgcttctgaggagtcaccggtgcaaaccccactcttcctcttgggctgtggttattagtcccaatgctgctatgtcgggggtgtccagggttctctttaccgagactgtctgacttagctctctgctcaccttgaccacttcccccttcaaaccacaagtaagattctgtacttcagagagccctgagagccccaccgccgccgccagcctggtcatcgtcacaccccaaggagccgcagccattgctgccggccccagtcactatcaccgcaaccatgagaaacccagcagccgccctcagcccccccccccccgccctcagcgctgccaacaccaagcctggctccacaggcagcaacgcgggtagtggcggccagggcggcctcacatggtcagcgcccgccggcggggacaagaaggtcatcgcaaggaaggttttgggaacaataaatggttcaacgaaaggaacggtttcatcaacaggaatgacaccaaggaagacgtatttgtacaccagactgccgtaaagaagaagaaccccaggaagaaccttcgcagggtaggagatggagagactggggtttgatgttgttgaaggagaaaagggtgcggaggtagcaagtgttacagaccctggtggagttccagttcaaggcggtaaaggcgcagcagaccgtaaccattatagacgctatccaggcaattaccagcacaattacaagaatagtgagagtggggaaaagaacgaggaaggccaggcccaacaacgccagccctatcgcaggtgagggttcccaccttacaacatacagagaccctatgtgcgcatggaccacagtattccaacacccctgtgcaaggagaagtgatagagggtgctgaccaccagggtacaggagaacaaggtagaccagtgagacagaatatgtatcggggttacagaccatggttccgcaggggccctcaaggtagaccagtaagacagaatatgtatcggggttacataccacggttccgcaggggccctcaaggtagaccagtaagacagaatatgtattggggttacagaccatggttccgcaggggccctcctcgccaaagacagcctagagaggatggcaatgaagaggacaaggaaaatcaaggagatgagacccaaggtcagcagccacctcaacgttggtatcgttgcaacttcaattaccgaggcagacacccagagaaccctaaaccacaagatggcaaagagacaaaggcagccgatccaccagtgagaattcgtctgctcccgggactgagcagagtcgggctgagtaaaagccggcttaccatctccaccatcatccggtttggtcatccaacaagactaaatgaatatgaaattccagcagtaagaaatgaacaaagatcagaactgaagaccttaagagcttgctctgtgcccgttgggcagatccactagagctgtctgcagtatctatgagcatggggtcttcttatttttacctaaagatgtctctttttggtaatgacaaatgtggttttttttttcttttttcttttttcttttttttttttcggagctggggaccgaacccagggccttgcgcttgctagactacagagcggaagagacctccaatactgctcacccctgcccacatcctggcccaataggaaattgtatacggcctctgggaactggaagataggggcactggagctgcaggtcccctgcaccccagacaccgccagaacctgaagggaccagatgaacagttctctgcggggttggggatttagcccagtggtagagcgcttgcctagcaagcgcaaggccctgggttcggtcctcagctcaaaaacaaaacaaaacaaaacaaacaaacaaaaaaaaaaaaccaaaaccagttctctgcacccaaatcccatgggagggagagctaaaccttcagagaggcagacacacctgggaagccagaagagactacactctgcctacatttctgactacagaggaaaacaccaaacgccatctgggaccctggtgcacggggggccctccagaaaaggcggcacaggtcctcctggttgctgccctcatggagagtgcataagcaacaccccacgaacaaacttgagcctcgggaccacaggtaagaccaacttttctgctccaagtgacctgcctggtgaactcaggacacaggctcacaggaacagctgatgacctgtagagaggaaaaactac

SEQ ID NO: 821 - DNA, 1619 bp, Rattus norvegicus
  Genbank Accession No. NM_012489
actttcaggcctcgtgaggtagagggctggcctgcgcctgcgcctgccatcattttggtttgttaagcaaggcagagcatgagcgagtcggtgggacgcacctccgcgatgcatcggctgcaggtagtgctgggccacctggccggccgacccgagtcgagctccgcgctgcaagccgcgccctgctccgctaccttcccgcaggcttcggcctccgacgtggtggtggtgcacggacggcgcacccccatcggccgcgcgggccgcggcggcttcaaggacaccacccccgacgagcttctgtcggccgtgttgaccgcggttctccaggacgtgaagctaaagcctgagtgtttgggagacatctctgtgggtaacgtacttgagccaggagccggagcagtcatggcgcgcattgcccaatttctgagtggcatcccagagaccgtgcctctgtcagcagtcaacagacagtgttcatcgggactgcaggcagtggccaacattgctggtggcatcagaaatgggtcttacgacattggcatggcctgtggggtggagtccatgtccctgtctaacagagggaaccctgggaatatttcctcccgcctgctggagagtgacaaagccagagactgcctgattcctatggggataacctcggagaatgtggctgagcggtttggcatctcacggcagaagcaagatgccttcgcgctggcctctcagcagaaggcagcaagtgcccagagcaaaggctgcttccgtgctgagatcgtacctgtgacaaccactgtcctcgatgacaagggtgacaggaaaaccatcaccgtgtctcaggatgagggtgtccgccccagcaccaccatggagggcctggccaagctgaagcctgccttcaaggatggaggctctaccacggctggaaactccagtcaggtgagtgatggagcagccgccgtcctgctggcccggaggtccaaggctgaagaactgggcctccccatccttggcgtcctgaggtcctatgcagtggtcggggtccctcctgacatcatgggcatcggacctgcctatgccatccctgcggccttgcagaaagcagggctgactgtgaatgacatagacatctttgagatcaatgaggcctttgcaagtcaggccctctactgtgtggagaagctgggaattcctgcagagaaggtgaaccccctggggggtgcaatagccctgggccaccccctgggctgcaccggagcaaggcaggtggtcacgctgctcaatgagctgaagcgccgaggcacacgggcttatggcgtggtgtccatgtgcattgggactgggatgggagccgctgctgtctttgaataccctgggaactgaggccctgactgcaggcactacccagagagtcctatagtagtgtctggagagggatggtacaggagccatcttcgtgggacactcagcagtggagggatttgtcacagcacttcaattcagaagatgtagtcgatgttggaacaggaggtggaactgccctgtcaagtaccccaagccatgctaaagtgagcatgggacacccaggttgcaaagccatctgtacctctgacggatgc

SEQ ID NO: 822 - DNA, 2363 bp, Rattus norvegicus
  Genbank Accession No. NM_012522
attccccgcgtctgagtctagctgcaccctgctccttgtctcccatccttgcaaagcttgtctgagtggagccaacacgcccagagggggacaggagagtcaactactaaaccaacaggtttctgcgacctcagcaaatcccagcatgccttcagggacatcccagtgtgaagatggctctgcagggtgcccccaggacttggaggtacagccagaaaaagggcaactggagaagggagcctcaggggacaaggaaagagtctggatctcgcctgataccccaagcagatgtacttggcagctgggcaggcccatggcggattccccacattaccacacagtgccgacaaaatccccgaaaattttgccagatattctgaggaaaattggcaacacccctatggtcagaatcaacaggatctccaagaatgcaggactcaagtgcgagctgttggccaagtgtgagttcttcaacgccggtgggagtgtgaaggaccgcatcagcctccggatgattgaagacgctgagcgagccggaaccttgaagcccggagacacgatcattgagccaacttctggcaacacagggatcgggctggctctggcagctgctgtgaagggctatcgctgcattatcgtgatgcctgagaagatgagtatggagaaggtggatgtgctgcgagctctgggagctgagattgtgaggacgcccaccaacgccagattcgattcccccgagtcccacgtaggagtggcatggcgactgaagaacgaaatccccaattctcacattctggaccagtaccgcaatgccagcaaccccttggcgcactacgatgacaccgcagaggagatcctgcagcagtgcgacgggaaggtggacatgctggtggcttcagcaggcacgggtggcaccatcacgggtatcgcgaggaagctgaaggagaagtgcccaggttgtaaaatcatcggtgtagatcccgaggggtccatcctcgcggagcccgaggagctgaaccagacggagcaaacagcctatgaggtggaagggatcggctacgacttcatccccaccgtcctggacagggcggtggtggataggtggttcaagagcaatgatgacgattccttcgccttcgcccgcatgctcatctcccaggagggactgctgtgcggtgggagttcaggcagcgctatggccgtggctgtgaaggctgcccaggagctaaaggaaggacagcgctgtgtggtcatcctgcccgactctgtgcgcaactacatgtccaagttcttgagtgacaaatggatgctgcagaaaggcttcatgaaggaggagctctccgtgaagagaccctggtggtggcatctgcgtgtccaagagctgagcccatcagcaccgctgaccgtgttgcccactgtcacctgtgagcacaccatcgccatcctccgggagaagggttttgaccaggcacctgtggtcaacgagtctggggccatcctagggatggtgactctcgggaacatgttgtcctccctgcttgctgggaaggtgcggccatcagacgaagtctgcaaagtcctctacaagcagttcaagccgatccacctgaccgacacactgggcatgctctcccacatcctggagatggaccacttcgccctggtggtccatgagcagatccaataccgcaacaatggcgtgtccagcaagcagctgatggtgtttggtgttgttaccgccattgacctgctaaacttcgtggcagcccgtgagcagacccggaaatagagttcagaagtcaggactggcttccatcctccctgctgggacttcttggctttcagagacaccgactggtttccacacccaagtccagcaggtggctgctgaggccagcaccctcccctcctaacgctcagctccctataggaatcctctatgtccgagtagcttacgtgggctttcctctggtgtcccagaaccaaggaatggcagccaggaaagataggcacagactacactcgccacaagactcagggtgcctaggaaagtgtcctctccagagagggctccagcctgagaaagggcaaaccctggactgactgtgctcatcctcagggggcagtgctggccccagcaagggagcatgtgggttttaaatgaaggtgcgttccagtgacctgagacccacagctgtgaagtaaacgtcgtgcctgtacggagtgtcaccacctgggtcatgaccctgcttagcagttcctcctcacatctccctcctttcccgacaagcacctactttctgtctcaactcttcctataaatgaatcacatacctgtggccatgtctacctaatttggaatt

SEQ ID NO: 823 - DNA, 3700 bp, Rattus norvegicus
  Genbank Accession No. NM_012532
ccaagaggaagaaacatgaagtttttgctgcttagtgcacttttatttttgcatagttccttagcttggacaagagaaaagcattattacatcggaattactgaagcagtttgggactatgcttctggcagtgaagaaaaggaacttatttcagttgacacggaacagtccaatttctatcttcgaaatggtccagatcgtattggaagaaagtataagaaggccctttattctgagtacacagatggcacctttacgaagactatagacaaaccagcctggctagggtttttaggccctgtcatcaaagctgaagttggagacaaagtttctgttcacgtaaagaactttgcctctaggccctacacttttcatgctcatggggtaacttacaccaaggcgaacgagggggccatctaccctgacaacaccactgattttcaaagagccgatgacaaactgtttcctggacagcagtatttgtacgtgctgcgtgccaatgagccaagtcctggcgagggagacagcaattgtgtgaccaggatttaccactctcatgtggatgctccaaaagatattgcatcaggactcataggaccgttgatactctgtaaaaaaggttctctgcataaggaaaaagaggaaaatattgaccaagaattcgtactgatgttctctgtggtggatgaaaatctcagctggtacctagaagataacatcaaaaccttctgctctgaaccagagaaagtcgataaagacaatgaagacttccaggaaagcaacaggatgtactctataaatggatatacatttggaagcctcccagggctctcgatgtgtgcagaagacagagtgaagtggtacctttttgggatggggaatgaagttgacgtgcattcagagctctttcatggtcaagccctgaccagcaagaactatcatactgatataatcaacctgttccctgccactctaattgatgtttctatggtggcccagaatcctggagtctggatgctcagttgccagaacctgaaccatctgaaagctggtttgcaggcctttttccaggttcgtgactgcaacaagccctcaccggacgacgatatccaagacagacatgtgagacattattacatcgctgccgaggagaccatttgggactatgctccgtctgggacagacaccttcactggagagaacttcaccagtctgggaagtgattcaagggtcttttttgagcaaggtgctacaagaattggtggctcttataaaaaattggtttatcgtgagtacacagatgattccttcacaaaccggaaggaaagaggccctgatgaggaacatcttggaatccttggtcctgtcatttgggcagaagtaggagacatcattagagtcacctttcataacaaaggacaatttcctctcagcattcagccaatgggggtaagattcaccaaggaaaatgagggaacatactatggcccagatggccgttcctcaaagcaagcctcccatgtggctcccaaagaaacctttacgtatgaatggactgtccccaaagaaatgggacccacttatgcagatcctgtgtgcctatctaagatgtattattctggagttgacctcaccaaagatatatttactgggcttattgggccaatgaaaatatgcaagaaaggcagcttacttgcagatgggagacagaaagatgtagacaaggagttctacttgtttgcaacagtgtttgatgagaatgagagtttactcttggatgataatatcagaatgttcacaactgcacctgagaatgtggacaaggaagatgaagactttcaggagtccaacaagatgcactccatgaatggattcatgtatggcaatctgcctggcctcaatatgtgcctaggagaatccatcgtgtggtatttgttcagcgctggaaatgaggcagacgtgcatgggatatacttttcaggaaatacctatctgtccaaaggagaaagaagagacactgcaaatctgtttcctcataaaagtctcacccttctcatgacacctgacacagaagggtcttttgatgttgagtgtcttacaacagatcactacaccggcggcatgaagcaaaagtacactgtgaaccagtgcaaggggcagtttgaagatgtcactctctaccagggagaaaggacctactatattgcagcagtggaggtggaatgggattattcaccaagcagggactgggaaatggagctgcaccatttgcaagagcaaaatgtttcaaatgcatttttggataaggaagagtttttcataggctcaaagtacaagaaggttgtgtatcgagagtttactgacagcacattcagagaacaggtgaagagaagagctgaagaggagcacttgggcatgctcggtccactgattcatgcagatgttggagccaaagttaaagttgtctttaaaaatatggcaacaaggccatattcaatacatgcccacggagtgaaaacaaagagttctacagttgctccaacgttgccaggtgaagttcgcacttatatatggcaaattccagaaagatcaggtgctggaacggaggattcaccttgtatcccatgggcttattactcaaccgtggatcgagttaaggatctctacagtgggctaataggcccattgattgtttgtcggaaatcttatgtgaaagtattcaatcctaaaaagaaaatggagttttcccttttgtttctagtttttgatgagaatgaatcttggtacttagatgataacatcaatacataccccgatcaccctgagaaagataacaaagacaacgaggaattcatagaaagcaataaaatgcatgctatcaatgggaaaatgttcggaaacctccaaggtctcacgatgcacgtgggagatgaggtcaactggtatgtgatggctatgggcaatgaaatagacctgcacactgtacacttccacggccacagcttccaatacaagcacaggggaattcatagttctgatgtctttgactttttccctggaacataccaaaccctagaaatgtttccccaaacgcctggaacctggttactccactgccatgtgactgaccatattcatgcggggatggtaactacctacactgttttaccaaatcaagagactaagtctggctgaaagaaataaattggtgataagtggaatacgagcacaatgacgttgttttaaacatttaaaaaaatcaaagccacacaaatgttcatttgtgagggaattggtaatgccgatggacagatgaacagactgtatcatgacatgtatttgtttgctgggtaacagaatcgctttacatagtccacttacacctgcactgaaaggactctgaaaagtggaaaaaaataagcaaaaccgtatgatcagatgctgtccttgactgtcctcacaggatcactataaagtccactaaactgtctccaactcttctcatcaagtcctctaacaaaccatggggtaagagggtatagaaaagaaggaaagatgaagataccaagatgcactttgtaaaaatctgaaaaacagttgaaggatgctctcggaaaatagagaaagtcaggatccaattatgttacattttgaaaaaatgaaatggagataataaagtaataaattttaaaatgccaat

SEQ ID NO: 824 - DNA, 1954 bp, Rattus norvegicus
  Genbank Accession No. NM_012545
ttaactgtcaccaaggagagagagagagagcaagagagcgaatagagaggaggcgactccagctgcctttttcaacatggattcccgtgaattccggagaagagggaaggagatggtggattatatagctgactatctggacggcattgagggacgtccagtgtaccctgacgtggagcctggctaccttcgggccctgatccccaccactgccccccaggagccagaaacatatgaggacataatcagagacattgaaaagataatcatgccaggggtcacacactggcacagcccctacttcttcgcttacttccccacggccagctcctacccagctatgcttgcggacatgctgtgcggggctatcggctgcattggcttctcctgggctgcaagcccagcatgcacagagctggagacagtgatgatggattggctggggaagatgcttgagctgccagaggcctttttggctggaagagctggggaagggggaggagtgatccagggaagtgccagcgaagccaccttggtggccctactggctgctcggactaaaatgatccgccagctgcaggcagcctccccagagctgacacaagctgctctcatggaaaagcttgtcgcttacacatctgatcaggcacattcctccgtagaaagagctggattaattggtggagtcaaaataaaagcaattccttcagatggcaactactccatgagagctgctgcccttcgggaggccctggagagagacaaggcggctggcctgattcctttcttcgtggttgtcaccctaggaaccacatcttgctgctcttttgacaatctcctagaagtgggtcccatctgcaaccaggagggtgtatggctgcacattgatgctgcatacgcaggcagtgcctttatctgtcctgagttccggtatcttctgaatggcgtggagtttgcagattcctttaactttaatccccacaagtggcttttggtgaattttgactgctctgccatgtgggtgaagaagagaactgacctaaccgaagcctttaatatggaccctgtttatctgaggcacagtcaccaggactcaggactcatcactgactacaggcactggcaaatcccactggggcgaagatttcgctccctgaaaatgtggtttgtttttagaatgtacggagtcaaggggctgcaggcttacattcgaaagcacgtgaagctgtctcatgagtttgagtccctggtacgccaggaccctcgctttgaaatttgcacggaagtcatcctcgggttggtctgcttccggctaaagggctccaaccagttgaacgaaactctcttacaaagaataaacagcgccaaaaaaatccacttggttccgtgtcgtctccgagacaagtttgtgctgcgctttgcggtgtgctcccgcactgtggagtctgcccacgtgcagctggcctgggagcacatccgagatctagcgagcagtgtgctgagggcagagaaagagtaaaagcagagccgcttcagagacccaaagttgaaaaaaagtttttccgaaaactgggaagagaaaaataaccacccctccgtcttcgtgaaatcatgcttgtatgtggcgtcatgtgtgtctccaaaattaaccagaaactgctgattgacttttcagtgacttctcaatgaagaaatactttctgcattatccagggaaagtattaatctgtgtggaaattaacaccagtggctctagcttctgttctttgtgtggccgtgatttttgttgataataagatgtctcagtgttcataaagccgtaggtggtagaaaaggcttatagaaatattttctagggtggtttttggtctttcttgccttcagatgatatctctggctgttaacttgtcctctgtgtggctaaatacttaataaacaacccgtgtgcaatact

SEQ ID NO: 825 - DNA, 3112 bp, Rattus norvegicus
  Genbank Accession No. NM_012551
cgcagaacttggggagccgccgccgcgattcgccgccgccgccagcttccgccgccgcaagatcggcccctgccccagcctccgcggcagccctgcgtccaccacgggccgcggccaccgccagcctgggggcccacctacactccccgcagtgtgcccctgcaccccgcatgtaacccggccaacatccggcgagtgtgccctcagtagcttcggccccgggctgcgcccaccacccaacatcagctctccagctcgcacgtccgggatggcagcggccaaggccgagatgcaattgatgtctccgctgcagatctctgacccgttcggctcctttcctcactcacccaccatggacaactaccccaaactggaggagatgatgctgctgagcaacggggctccccagttcctcggtgctgccggaaccccagagggcagcggcggcaataacagcagcagcagcagcagcagcagcagcgggggcggtggtgggggcggcagcaacagcggcagcagcgctttcaatcctcaaggggagccgagcgaacaaccctacgagcacctgaccacagagtccttttctgacatcgctctgaataacgagaaggcgctggtggagacaagttatcccagccaaactacccggttgcctcccatcacctatactggccgcttctccctggagcctgcacccaacagtggcaacactttgtggcctgaaccccttttcagcctagtcagtggccttgtgagcatgaccaaccctccaacctcttcatcctcagcgccttctccagctgcttcatcgtcttcctctgcctcccagagcccacccctgagctgtgccgtgccgtccaacgacagcagtcccatttactcagctgcacccacctttcctactcccaacactgacatttttcctgagccccaaagccaggcctttcctggctctgcaggcacagccttgcagtacccgcctcctgcctaccctgccaccaagggtggtttccaggttcccatgatccctgactatctgtttccacaacaacagggagacctgagcctgggcaccccagaccagaagcccttccagggtctggagaaccgtacccagcagccttcgctcactccactatccactatcaaagccttcgccactcagtcgggctcccaggacttaaaggctcttaataacacctaccagtcccaactcatcaaacccagccgcatgcgcaagtaccccaaccggcccagcaagacacccccccatgaacgcccgtatgcttgccctgttgagtcctgcgatcgccgcttttctcgctcggatgagcttacacgccacatccgcatccatacaggccagaagcccttccagtgtcgaatctgcatgcgtaatttcagtcgtagtgaccaccttaccacccacatccgcacccacacaggcgagaagccttttgcctgtgacatttgtgggagaaagtttgccaggagtgatgaacgcaagaggcataccaaaatccacttaagacagaaggacaagaaagcagacaaaagtgtcgtggcctcctcagctgcctcttccctctcttcctacccatccccagtggctacctcctacccatcccccgccaccacctcatttccatccccagtgcccacctcttactcctctccgggctcctctacctacccgtctcctgcacacagtggcttcccatcgccctcggtggccaccacctatgcctccgtcccacctgctttccctgcccaggtcagcaccttccagtctgcaggggtcagcaactccttcagcacctcaacgggtctttcagacatgacagcaaccttttctcctaggacaattgaaatttgctaaagggaatgaaagagagcaaagggaggggagcgcgagagacaataaaggacaggagggaagaaatggcccgcaagaggggctgcctcttaggtcagatggaagatctcagagccaagtccttctagtcagtagaaggcccgttggccaccagccctttcacttagcgtccctgccctccccagtcccggtccttttgacttcagctgcctgaaacagccacgtccaagttcttcacctctatccaaaggacttgatttgcatggtattggataaaccatttcagcatcatctccaccacatgcctggcccttgctcccttcagcactagaacatcaagttggctgaaaaaaaaaatgggtctgggccctcagaaccctgccctgtatctttgtacagcatctgtgccatggattttgttttccttggggtattcttgatgtgaagataatttgcatactctattgtactatttggagttaaattctcactttgggggagggggagcaaagccaagcaaaccaatggtgatcctctattttgtgatgatcctgctgtgacattaggtttgaaacttttttttttttttgaagcagcagtcctaggtattaactggagcatgtgtcagagtgttgttccgttaattttgtaaatactgctcgactgtaactctcacatgtgacaaaatacggtttgtttggttgggttttttgttgtttttgaaaaaaaaattttttttttgcccgtccctttggtttcaaaagtttcacgtcttggtgcctttgtgtgacacaccttgccgatggctggacatgtgcaatcgtgaggggacacgctcacctctagccttaagggggtaggagtgatgtttcaggggaggctttagagcacgatgaggaagagggctgagctgagctttggttctccagaatgtaagaagaaaaatttaaaacaaaaatctgaactctcaaaagtctatttttttaactgaaaatgtagatttatccatgttcgggagttggaatgctgcggttacctactgagtaggcggtgacttttgtatgctatgaacatgaagttcattattttgtggttttattttacttcgtacttgtgtttgcttaaacaaagtgacttgtttggcttataaacacattgaatgcgctttactgcccatgggatatgtggtgtgtatccttcagaaaaattaaaaggaaaataaagaaactaactggt

SEQ ID NO: 826 - DNA, 2078 bp, Rattus norvegicus
  Genbank Accession No. NM_012591
ctcgacgaaggagtaggacgagctctcactgtctgagccaaaccgaaccgggccgagctgagccgaggtcagcggtggccagaggaacccagcatctcgggcatcattcgctccgtgcacgcatcgtgtacctacaccgcaactccgtgcctcattcccgggtaccctctgtgactcgctcctgcagcaaagccaccatgcctatcactcggatgcgaatgagaccctggctagagatgcagattaattccaaccaaattccagggctgagctggatcaataaagaagagatgatcttccagatcccatggaagcatgctgccttgcacggttgggatatcaacaaggatgcctgtctgttccggagctgggccattcacacaggccgatacaaagctggggaaaaagagccagatcccaagacttggaaggcaaacttccggtgtgccatgaactccctaccagacatcgaggaagtgaaggaccagagcaggaacaagggcagctctgctgtacgcgtgtaccggatgctgccacccctcaccaagaaccagaggaaagagagaaagtccaagtccagccgtgacactaagagcaaaaccaagaggaagctgtgcggagattctagccctgacaccttatctgacggactgagcagctctactctgcctgatgaccacagcagttacacagctcagggatacctgggtcaggacttggacatggacagggacattaccccagctctgtcaccgtgcgtcgtcagcagcagtctctctgagtggcatatgcagatggacatcatgccagacagcaccactgatctgtacaacttgcaggtgtcgcccatgccctccacctctgaagctgcaacagatgaggatgaggaagggaagttacctgaggacatcatgaagctctttgaacagtctgagtggcagccgacgcacgtggatggcaagggatacttgctcaatgaaccaggagcccaactctctactgtctatggagacttcagctgcaaggaggaaccagagatcgacagccctggaggggacatcgagataggcatacagcgtgtcttcacagagatgaagaatatggaccccgtcatgtggatggacaccctgctgggcaactctaccaggccgccctccattcaggctattccttgtgcaccataatttgggtccctgacccgttcttgccctcctgagtgagctaggtccagcatcatggtggctgtgatacaacataaagctaaacttccgtggaccccttgatgtggcaaaacataatcccattgccaagcagggaagggaccaaaccatcctccttgggtcagtggactgactcttcagagcttaggaggcagggtctaagtttttcaagctggtcctgactcctaggaagatggattggcgttctgaggttagtgtgaggcagaggacctggacggaagttaccttctagctctttgaaagcttcattgcttagagagggtctcaccactgggctggcctgggggatagaccagcgcccacagaagagcattgcactggccttagggctggctccacactgggagacaattgcactaagtcctattcccaaagaactgctgcccttcccaaccgagccctgggatggttctagagccagtgaaatgtgaaggaaaaaatggggtcctgtgagggttgtctcccttagcctcagagggattctgcctcactccctgctccagctgtggggctcaggaaaaaaaaatggcactttctctgtggactttgccacatttctgatcagaagtgtacactaacatttctcccaagtcttggcctttgcatttatttatatagtgccttgccctgtgcctgctgtctctcctcaggcctcagcagtcctcagcaggcccagggagggggttgtgagcgccttggcgtgactctgaacattggaaacgccacctaactactaagttgtgtctgatctcgtgtggatctgtgtaaatatgtatattcatctttttataaaaacctaagttgtttaaaaaaaaaaaaaaaaaaaaaaaaaaaaaa

SEQ ID NO: 827 - DNA, 2104 bp, Rattus norvegicus
  Genbank Accession No. NM_012592
tggtatacagcggagatggcgactgcagtccggctgctggggcggcgagtttccagttggagactgcggcctttaccgtcgccccttgctgtcccgcagcgggcccactcgatgttgcctgtggatgatgatatcaacgggctaaacgaggagcagaagcagcttcgtcatacgatatctaagttcgttcaagagaacctggcccccaaggcccaagagattgatcaaagcaatgacttcaagaacctgagagagttctggaagcagctgggaagcctgggagtcctgggcatcacagcccccgttcagtatggtggctctggcctgggctacctagaacatgtgttggtgatggaagagatatcccgggcttcagcagctgtggggctcagctatggcgctcactccaacctctgcatcaaccagattgtccgcaatgggaatgaggcacagaaagagaaatatcttcccaagctcatcagtggtgagttcatcggagccctggccatgagtgagcccaacgctggctctgacgttgtctccatgaggctgaaagcagagaagaaaggagatcactacgttctgaatggcaacaagttctggatcaccaatggccctgacgctgatgtcctagttgtctatgccaagacagacttgactgctgtgcctgcgtctcggggcatcacagccttcattgtggaaaaggatatgcctggtttcagcacctcgaagaagctggacaagctaggcatgaggggctccaacacctgtgagctagtctttgaagactgcaaggttcctgctgctaacatcctgagccaagagagtaagggtgtctacgtactgatgagcgggctggacctagaacgcctggtgctggcaggtggaccccttgggatcatgcaggctgtcctggaccacaccattccctatttgcatgtgagggaagcctttggccagaagatcggccaattccagctgatgcagggaaagatggctgacatgtacacccgcctcatggcatgtcgacagtatgtctacaatgtcgccagggcctgtgacgagggccacatcactgccaaggactgtgctggtgtgattctgtatacagccgagtgtgccacacaagtagccctggatggcattcaatgtttaggtggaaatggctacatcaatgacttccccatgggccgctttcttcgagatgccaaactgtacgagatcggaggtgggaccagtgaggtgaggcggctagtcattggcagagctttcaacgcagacttccgctagcctggggccatcaccctgctcccagcagcaggaggcctttggaagcagagacgtggcagccctctgacttggctaaggaagctctgctgctcaactgccctcttgccagccctctgctcttcgtgaagtcggattctccagccgtgccagccagtcaatcaagaaagcctaaaattcggtccccagctccgaaaaaaaaaaaaaaaaaaaagaaccaaaagaaagcctaaaatggctgctaaaaggactttggcttttctggggtttgcagggagggtaacagtgtctgcgcccttgttctctacttctgaatgtagtaacctcaccctctggggtagcatatgacaggtacccaactccttttcgtgggcaagcctctggcaggggagctctttctgttgcaatgtaacagaggcattgcctctttcaattgtcagatacttgtggtctcttttcttgaggaaaaggcaaaaaccatgtccttcttagctgtttccccaagagctagctagacagttccagaatgcctgtgtggcagacccatgaagggcagagtccacagtctagccaagacaacttggagattggctccctggtgtggctgagtgtctacatcactccgtcacaggctagcactgggcctgctcacgtgaccttctgcagctgcctgactccggtggcccagcttaggttgcctggctcaactccagccttgctgtctatgtatatttctctagacgccctgtggctaattttgttacaaccacacaggctctgctgccattttgtattaaacatactgcaaagtaaaaaa

SEQ ID NO: 828 - DNA, 786 bp, Rattus norvegicus
  Genbank Accession No. NM_012593
atgtggttcctgatcctattcctcgacctgtccctggggcagattgatgctgcacctcccggccagtctcgggttattggaggatataaatgtgagaagaattcccaaccctggcaagtggctctatacagcttcacgaaatacctctgcgggggtgtcctgatagaccccagctgggtgatcacggctgcccactgctctagcaacaattaccaggtttggctgggccgaaacaacctattagaagatgaaccatttgctcagcaccggcttgtcagtcaaagcttccctcaccctgactacaaaccattcctcatgaggaaccacacccgaaaacctggcgatgaccacagcaatgatctgatgctgctacatctcagccagcctgcggacatcacagatggggtgaaggtcatcgatctgcccactgaggagcccaaggtggggagcacctgccttgcctcaggctggggcagtaccaaaccccttatatgggaattccctgatgatctccagtgtgtgaacatccacctactgtctaatgagaagtgcatcaaagcctacaaagaaaaggtgacagatctgatgctgtgtgcaggagagttggaaggaggcaaagacacttgcacgggtgactcaggaggccccctcctctgtgatggtgtgctccagggcatcacatcatggggctctgtcccatgcgccaaaaccaacatgccagccatctacaccaaacttattaagttcacctcctggataaaagaagttatgaaggaaaacccctga

SEQ ID NO: 829 - DNA, 1217 bp, Rattus norvegicus
  Genbank Accession No. NM_012595
cagagcctcctcttgtctggacaagatggcaacccttaaggaaaagctcattgcgccagtcgcagacgacgagactgccgtcccgaacaacaagattactgtagtaggcgttggacaagttggaatggcttgtgctatcagcattctggggaagtctctggctgatgagcttgccctggtggatgtcttggaagacaagctcaaaggagaaatgatggatctgcagcacgggagcttatttctccagactccgaaaatcgtggctgataaagattactccgtgacagccaattctaagattgtggtggtgaccgcgggagtccgccagcaggagggggagagtcggctcaacctggtgcagagaaacgtcaatgtattcaagttcattattcctcagatcgtcaagtacagccccgactgcaccatcatcgtggtttccaacccagtggatattcttacctatgtcacctggaagctgagcgggctacctaagcaccgcgtgattggaagtggatgcaatctggattctgctcggtttcgttacctcatggccgaaaagcttggtattcatcccagcagctgccacggctggatcctgggcgagcacggggactccagtgtggcagtgtggagcggggtgaatgtggcaggagtctccctccaggaactgaacccagagatgggaacggacaatgacagcgagaactggaaggaggtgcataagatggtggtggacagtgcctatgaagtcatcaagctaaaaggctacaccaactgggccatcggcctaagtgtggctgacctcatcgaatccatgctgaaaaacctctctcggattcaccccgtgtctacaatggtgaagggaatgtacggcatcgagaacgaagtcttcctcagtctcccgtgcatccttaatgctcggggactgaccagcgtcatcaaccagaagctgaaggacgatgaggtcgctcagctcaggaagagtgcggacaccctgtgggatatccagaaagacctcaaggacctgtgactgccaggcgccaggctgtagaaatccaaacctccaatgtgactaagtgaacctttagtcttcggccttgtacgtaggtcacagtttgcttcttccctaacatgtgataatgagctcacagatcaaaaccaggagtgtttgatgtttgcactaggagctcctgaacaaataaagtttagcaattgca

SEQ ID NO: 830 - DNA, 2168 bp, Rattus norvegicus
  Genbank Accession No. NM_012603
actcgctgtagtaattccagcgagagacagagggagtgagcgggcgggttggaagagcccagtgtgcagagccccactccgggcttcctaggaaggcagctctggagtgagaagggctttgcctccaggcttgctgcctcctcgacccaatcctcccgctgacccaacatcagcggtcgcaaccctcgccgcctctgggaaactttgcccattgcaacgggcagacacttctcactggaacttacaatctgcgagccaggacaggactccccaggcgcaggggagggaatttttgtctatttggggacagtgttctctgcctctgcccgcgatcggctcccctgaaaagagctcctcgcgttatttgaagcctgaatttcctttgggaggtggaaaacccgacagtcacgacgatgcccctcaacgtgagcttcgctaacaggaactatgacctcgactacgactcggtgcagccctatttcatctgcgacgaggaagagaatttctatcaccagcaacagcagagcgagctgcagccgcccgcacccagtgaggatatctggaagaaattcgagctgctgcccaccccgcccctgtcccccagccgccgctccgggctctgctctccgtcctatgtcgcggtcgctacgtccttctccccaagggaggacgatgacggtggcggtggcaacttctccaccgccgatcagctggagatgatgaccgagctacttggaggagacatggtgaatcagagcttcatctgcgatcctgacgatgagaccttcatcaagaacatcatcatccaggactgtatgtggagcggcttctcggccgctgccaaactggtctccgagaagctggcctcttaccaggctgcgcgcaaagacagcaccagcctgagccccgcccgcgggcacagcgtctgctccacctccagcctgtacctgcaggacctcaccgccgcagcgtccgagtgcatcgacccctcagtggtcttcccctacccgctcaacgacagcagctcgcccaaatcctgtacctcgtccgattccacggccttctcttcttcctcggactcgctgctgtcctccgagtcctccccacgggccacccctgagcccctagtgctgcatgaagagacaccgcccaccaccagcagcgactctgaagaagaacaagatgatgaggaagaaattgatgtggtgtctgtggaaaagaggcaaccccctgccaagaggtccgagtcagggtcatccccatcaagaggccacagcaaacctccacacagcccactggtcctcaagaggtgccatgtctctactcaccagcacaattatgcagcacccccctccacaaggaaggactatccagctgccaagagggccaagttggacagtggcagggtcctgaaacagatcagcaacaaccgcaaatgctccagccccaggtcctcagacaccgaggaaaacgacaagaggcggacacacaacgtcttggaacgtcagaggagaaacgagctgaagcgtagcttttttgccctgcgcgaccagatccctgagttggaaaacaacgaaaaggcccccaaggtagttatcctcaaaaaagccaccgcctacatcctgtccgttcaagcagatgagcacaaactcatctcagaaaaggacttactgaggaaacggcgagaacagttgaaacacaaactcgaacagcttcgaaactctggtgcataaactgaccggaagtgaggaggagctggaatctcgagtgtaaggagaacggttccttctgacagaacttggacttcaaaaaatgcatgctcaaagcctaacctcacaaccttggctggggctttgggacttcagccataatgttaactgcctcaaagttaaggcataaaagaacttttttttatgcttcccatcttctttctttttcctttaacagatttgtatttaattgttttttttaaaaaaatcttccggtgtacatagggcctttaaatgtaaataactttaataaaacgtttataacagttatacaagattttaagacatgtatgataaaccataattttttttatttaaagaccttttcatttttaaagttgatttttttctattgtttttagaaaaaataaaataattggaaaaaatataattgagcca

SEQ ID NO: 831 - DNA, 1998 bp, Rattus norvegicus
  Genbank Accession No. NM_012619
agccctcccatcctgagtgccaacctttcccaaccccgctgctaagctagacacctcactcactgagagccagcatggcagctgttgtcctggagaatggagtcctgagcagaaaactctcagactttgggcaggaaacaagctatattgaagacaactccaatcaaaatggtgccatatctctgatattctcactcaaagaggaagttggtgccctagccaaggtcctgcgcttatttgaggagaacgatatcaacctgacacacattgaatccagaccttctcgtttaaacaaagatgagtatgagttcttcacttatctggataagcgtacgaaacctgttctgggcagcatcatcaagagcctgaggaatgacattggtgccactgtccacgagctttcccgagacaaggaaaagaacacagtgccctggttcccaaggaccattcaggagttggaccgattcgccaatcagattctcagctatggagccgaactggatgcggaccacccaggctttaaagatcctgtgtaccgggcgagacgaaagcagtttgctgacattgcctacaactaccgccatggccagcccatccctcgggtggaatacacagaggaagagaagcagacctggggaacggtgttcaggaccttgaaggccttgtataaaacacatgcctgctacgagcacaaccacattttcccacttctggaaaagtactgcggtttccgtgaagacaacattccacagctggaagatgtttctcaatttctgcagacttgtactggtttccgcctccgacctgttgctggcttactgtcatctcgagatttcttgggtggcctggccttccgagtcttccactgcacacagtacattaggcatggatcgaagcccatgtacacacctgaacctgacatctgccatgaactcttgggacatgtgcctttgttttcagatcgcagctttgcccagttttctcaggaaattgggcttgcatcactgggggcacctgatgagtacattgagaaactggccacaatttactggtttactgtggagtttgggctttgcaaggaaggagattctataaaggcatatggtgctgggctcttgtcatcctttggagaattacagtactgtttatcagacaagccaaagctcctccccctggagctagagaagacagcctgccaggagtattctgtcacagagttccagcccttgtactacgtggcggagagtttcagtgatgccaaggagaaagtgaggacttttgctgccacgatccctcggcccttctcggttcgctatgacccttacactcaaagggttgaggtcctggacaatactcagcagttgaagattttagctgactccattaatagtgaggtcggaatcctttgcaatgccctgcagaagataaagtcgtgagcagaaaatgacgtcatgggcagaacttaggaggtcaaccagaaatcggtcgatagaagtatagtaactgcctttgttcccctgaagaaaaaaagttttatttgaaacgtcagcttttattatttttgctaacacagtggagcatcaccaaataaatcaaagttctctgaaatgaaagtgtgttaaaaccctccaggggtagatctttcagaatcacatttgatttagataatctcatagcttcaatttggtttaaaatgtaattttctcagctctcatcaacattcatcaaatttggggcttgtgtcattggggcttcatccgttcatttttaacctctcaggtaagctctgaaggaacacatttggctgagtgtaaaatgtaagactgccatcagggatgaatcattccgttcagtacagattgtaatctacaaagggtagttttcaccttcgttcattatggctctgagaactgctttgttagcctgcttacataaatctcccctgatcggagaccctattaagatagttacaagcaataaagttttagagcattatat

SEQ ID NO: 832 - DNA, 3053 bp, Rattus norvegicus
  Genbank Accession No. NM_012620
cccccgagagctttgtgaaggaggaacgctgcacacccgcctcccgcagcacacagccaaccacagctgagcgacacgcaacaagagccaatcacaaggcacttccgaaagctccaggatgcagatgtcttcagccctcacttgcctcaccctgggcctggttctggtctttgggaaagggttcgcttcaccccttccagagtcccatacagcccagcaggccaccaacttcggagtaaaagtgtttcagcatgtggtccaggcctccaaagaccgaaatgtggtcttctctccctacggcgtgtcctcggtgctggctatgctgcagctgaccacagcagggaaaacccggcagcagatccaagatgctatgggattcaatatcagtgagaggggcacagctcctgccctccgaaagctctccaaggagctcatggggtcatggaacaagaatgagatcagtactgcggacgccatctttgtccagcgggacctagagctggtccagggcttcatgccccacttcttcaagctcttccggaccacggtgaagcaggtggacttctcagaggtggaaagagccagattcatcatcaacgactgggtggagaggcacaccaaaggtatgatcagtgacttactggccaagggggctgtaaatgagctgacacgcctggtgctggtgaacgccctctatttcaacggccaatggaagacccccttcttagaggccagcacccaccagcgcctgttccacaagtctgatggtagcaccatctccgtgcccatgatggctcagaacaacaagttcaactacactgagttcaccactccggatgggcacgagtacgacatcctggaactgccctaccacggcgaaaccctcagcatgttcattgcagcaccctttgaaaaagatgtgcccctctccgccatcaccaacattttggacgctgagctcatcagacaatggaagagcaacatgaccaggctgccccgcctcctcatcctgcctaagttctctctggagactgaagtggacctcagagggcccctggagaagctgggcatgactgacatcttcagctcaacccaggccgacttcacaagtctttccgaccaagagcagctctctgtagcacaagcactacaaaaggtcaagatcgaggtgaacgagagcggcacagtggcgtcttcctccacagccattctagtctcagcccgcatggcccccacggagatggttttagaccgatcctttctctttgtggttcggcacaatccaacagagacaatcctcttcatgggccagctgatggagccttgagagtgggatgagaagcctttcctttgggacaaaactggacgtgttataagcagagactctgaagaaaagaattgttttaaggactctttggggagaaagagaaggcctttctttcttaccccggcactggtaaatctttccaaccagcctcccagacctcagactctcgaagaggaaagagtctaactccctcactagggacctatcttactaaggtctcatccaaccatagaactcacagaatctggatctgcccagcattcagcctttggacccagttcccaccaaggccccagcagggccaacccactacgccttcactcagcaaagtcttttgtgttccagtcacactctgggtacctcttgtatcgtcctccattgctatgaaggatgacccaggccaaaggaagaagcactgtcctatctcaaggtccactgtggaaatgaacaccttgcccatccccaaggggcagcagatagacagatcgaatgatcgcccgatatcaagccttctcccagctcccgtcctgccctcccttccctgacagccgccttgtgttatttcagagtgtagatgacttgtttacagcttttttcgacccacaaacttttctcattttgaaagcgtgaaagaaaggtcagatgtgcacgtgccttgctctttatcctgggtctccctgtgaggggagaggggtcctggggagattccaggggtgtgattgaatatttatcttgtttatcttatacgtttgttggggagaagaagcactattaaggagaaagccttttatttaaaccatggcatatggtgtcccatttggggtctgtatccctgtatgtcagggaggcatcactccacaaacccgcccctcgggtggcccggcgtcggggctcacactgccgcctagtggcagccgaacacgcccttgccccatccctcccccgcatcctcccccgtggctcttttccttagggatcttgccaaggtgatgcttggcagcccacggtaaaggaagggggaaaaagattaggtgggagagagagagagagagagagagagagagagagagagagagagagagagagagagagagagagagagaaagagagagagatgtttgagagagggcaaagtggtttcaaatttttccaatacattcagaagccgagtgggaaagggggctgtgtgacctaacaggacagaactttctccaattactgggtgactcagctgcactggtgactcacttcaatgtgtcatttccggctgctgtaagtgagcagtggacacgtgggggggggggggtgaggatgaaagaaacagccagctcctggtcaaccaccttagttagataatcttttttgaaagcttcctagctgggggtatgatcagaaaaccaatttactgaaaaactgcacaggaaggtaacgtgaatctaatttcatagcgggccgctctgcatccgttacatctccactggaaaaaaataatcattttctttttgtgtgtgtgtgtgtgttttagcttttctccctctccctctttctctctcatttcattatgcactggataaccatacaccgtgtaccacaggggcccaaatgtggggtcacatggtcttgaattttgtggggtacatatgcctttgtttgtttgttttcacttttgatatataaacaggtaaatgtgtttttaaaaaataataaaaatagagaatatgcagac

SEQ ID NO: 833 - DNA, 1635 bp, Rattus norvegicus
  Genbank Accession No. NM_012630
ggtcaagcgagctggattctagggaaacatagaagagtaatcatccagagaggggctctggtggagctcactagccattgactgttcttttcagaagtctggactccctgacctacaaggcctctcaagctaaaggacacttctctgtgaagggagcctctgatacattgcctatagcaagaagaaggggccaacctgaagaaaaacatgccatctgcacttgctttcgtcctacttgttctcaacatcagcctcctgaagggacagtcaccaccagggaaacctgagatccacaaatgtcgctctcctgacaaggaaacattcacctgctggtggaatcctgggacagatggaggacttcctaccaattattcactgacttacagcaaagaaggagagaaaaccacctacgaatgtccagactacaaaaccagtggccccaactcctgcttctttagcaagcagtacacttccatctggaaaatatatatcatcacagtaaatgccacgaaccaaatgggaagcagttcctcggatccactttatgtggatgtgacttacatcgttgagccagagcctcctcggaacctgacattagaagtaaaacagctaaaagacaaaaaaacatatctgtgggtaaaatggtccccacccaccataactgatgtgaaaactggttggtttacaatggaatatgaaattcgattaaagcctgaagaagcagaagagtgggagatccattttacaggtcatcaaacacagtttaaagtttttgacctatatccagggcaaaagtatcttgtccagactcgctgcaagccagaccatggatactggagtagatggagccaggagagttccgttgaaatgccaaatgacttcaccttgaaggacacaaccgtgtggatcattgtggccattctctctgctgtcatctgtttgattatggtctgggcagtggctttgaagggctatagcatgatgacctgcatctttccaccagttcctgggccaaaaataaaaggatttgatacccatctgctggagactggttctccaagcaaatacaaggtggatctgtacctggcccttcctggaggattccagaaactggacaatgcaggggaacttgactactgaagctgcagactcaaataggagcctctcaaaatgggttctaccaccatcgcaacaaatgctgagaacaagacagaaatttcccagtgccaataatctagtatccaggacgcctgcctggttagactttaaatttgctcaatgacaaacgagatcagtgttaattgtgtttcttgagcagctctcgtttgtttttctcttttgtcagcctcagccatctgccatcttgatccctcagtctcacgtggtgatatctatctttctgtgtgtgtgtgtatctctgtgtgtctctctgtgtcatctctctgtctctatgtgtctctgttcctctgtgtcttcctttgtcctttgtgttctctctctctctctctctctctctctctctctctctctctctctctctccaacttgcttcatgcttttctgggcttgagtgtgcttaagaaaacacattttacgatcatcagaataaccccccctttaaataaaaaactgtcc

SEQ ID NO: 834 - DNA, 2697 bp, Rattus norvegicus
  Genbank Accession No. NM_012634
aactgtacctgcgttcttcgggaccacccagagcttcaaacactgctgcccagcctgcgtgggcagaagcagaggcccagcaccctccagcgactcttgggctgctcctcctccctctggctcctcccctagcccgccccttccctagatcctgctgccgcgttttcccgcttcaccagcagcggcggccaccgcagcagccgcagcagcagcagccgcagcagcagcagcagcagcagcagcagcagcagcagcagcggcggcggcaactgcagcagccaccgtagcagcagtctgcgtcgcggtcgctttctccttctctggcgcgcttcagtccccgtgagtcaccatgcccaacatcgtgctcttcagcggcagctctcaccaggacctgtcgcagcgcgtggccgatcgcctgggcctggagctgggcaaggtggtcaccaagaagtttagcaaccaggagaccagtgtcgagattggtgaaagtgtgcgaggggaagatgtctatatcatccagagcggctgtggggaaattaatgacaacttgatggagctactcatcatgatcaacgcgtgcaagattgcatcctcatccagggtaacagctgtgataccctgcttcccctacgcccggcaagataaaaaggacaagagtcgtgctccaatttctgctaagcttgtggccaatatgttgtcagttgctggggctgatcacatcattaccatggacctgcatgcctctcagatccagggcttctttgatattcctgtggataatttatatgcagaacctgcagttcttcagtggattcgggagaacatcactgaatggagaaactgtattattgtttctccagatgctggaggagccaaaagggttacgtcaattgcagacagactgaatgtggaatttgctttgattcacaaagagagaaagaaagcaaatgaagtggaccggatggttcttgtgggcgatgtgaaggaccgtgtggctatcctggtggacgacatggctgacacatgtggtaccatctgtcatgctgcagataagttactctcagctggtgccaccaaagtttatgctattcttacccatggaatcttctctgggccagctatttccagaataaataatgctgcctttgaagcagttgttgtcaccaataccattccacaagaggacaaaatgaaacactgttccaaaattcaggtgatcgacatttcaatgattctggctgaggccattcgaagaacccacaatggggaatccgtgtcctatctgttcagccatgtcccgctgtagtctggattggaatattgaagggggagcaagcctcctccaacttctcactgtctttgtctgcctgctgttttagcattaggactcagcaattctaggatgatcactggcaaaagcgtctgatctatgtacactctgagggtcctctgtctcctcaagggcaagactactacttagcagttctgggggagggcagaggaaggtgctggttatttggtctttaaatgaagtgatgtcaatgagaaaatagtcttttccctcattcttttttagtactttgaggcaacaacttttaagcctaaaatcccattgtggaaatttgtcatacatatattttgaggttgccaaaggtgacttcaaatgaaagccttctgtgtaaatatataataaggcctgtggctatttggggaaaatcctaaatagcctttatttcagagagaaccttggaaaatttatactatcatgaattttgaaatttttttaataataacggtttattttattgtcctttatcaggactgaattttattgagtctaagctagtcattgacatactgactttccttagtagatattagacatattgaagacaatataaggctgtaccatttttaatcaccactttgaagatatgtcataactgtcaacttaactaaaactcccagattatgatcagtgatcactgttatttggataccatttcaggatgtagcaatgattttgtggccacctagatgtacaactttgtgtatcccaggggaattactctttaggatgacgctcacgtccatgcatttttccctaataatttcttcttgtagatgtcttccaaaagagagactccttgaaatccccttacattttttggctgattagtattttttttcacatacataaaatagtgaagtgtcgaatgccatcaaatgtatttattcaaaaattgcataattatgcttgagttaaatgttcttcggccctatgtcatcggaagtcctaaatttctaatgactagttatctctaaagctgctaaaatgtagataggagatggctacaaaacagtggctacaaaagtgaatgtctgatccattaaaataaacttcaaagaaatggctcggaaagcttagggaagaagatctcattatggatggtattctttataaaacaatcttttagtgaagtgtggaggtctgtgcggaccacatgtttaaggccagcctgggctatacagtgagttccaacttagcttgggctgcagaattagactgtgtgtcataaaaccaaatgaaacaacaaaggcagttctctatgtcatcattaaaagtggacaacctatcattttccttctcaccaagaagaggatttgcctgtgtacctaaagcttaggaatgctaac

SEQ ID NO: 835 - DNA, 4127 bp, Rattus norvegicus
  Genbank Accession No. NM_012637
agccgctgctggggaggttggggctgaggtggtggcgggcgacgggcctcgagacgcggagcgacgcggcctagcgcggcggacggccgagggaactcgggcagtcgtcccgtcccgccatggaaatggagaaggaattcgagcagatcgataaggctgggaactgggcggctatttaccaggatattcgacatgaagccagtgacttcccatgcagaatagcgaaacttcctaagaacaaaaaccggaacaggtaccgagatgtcagcccttttgaccacagtcggattaaattgcatcaggaagataatgactatatcaatgccagcttgataaaaatggaggaagcccagaggagctatatcctcacccagggccctttaccaaacacgtgcgggcacttctgggagatggtgtgggagcagaagagcaggggcgtggtcatgctcaaccgcatcatggagaaaggctcgttaaaatgtgcccagtattggccacagaaagaagaaaaagagatggtcttcgatgacaccaatttgaagctgacactgatctctgaagatgtcaagtcatattacacagtacggcagttggagttggagaacctggctacccaggaggctcgagagatcctgcatttccactacaccacctggcctgactttggagtccctgagtcacctgcctctttcctcaatttcctattcaaagtccgagagtcaggctcactcagcccagagcacggccccattgtggtccactgcagtgctggcattggcaggtcagggaccttctgcctggctgacacctgcctcttactgatggacaagaggaaagacccgtcctctgtggacatcaagaaagtgctgttggagatgcgcaggttccgcatggggctcatccagacggccgaccaactgcgcttctcctacctggctgtgatcgagggtgcaaagttcatcatgggcgactcgtcagtgcaggatcagtggaaggagctttcccatgaagacctggagcctccccctgagcacgtgcccccacctccccggccacccaaacgcacattggagcctcacaatggcaagtgcaaggagctcttctccaaccaccagtgggtgagcgaggagagctgtgaggatgaggacatcctggccagagaggaaagcagagccccctcaattgctgtgcacagcatgagcagtatgagtcaagacactgaagttaggaaacggatggtgggtggaggtcttcaaagtgctcaggcatctgtccccactgaggaagagctgtccccaaccgaggaggaacaaaaggcacacaggccagttcactggaagcccttcctggtcaacgtgtgcatggccacggccctggcgactggcgcgtacctctgttaccgggtatgttttcactgacagactgctgtgaggcatgagcgtggtgggcgctgccactgcccaggttaggatttggtctgcggcgtctaacctggtgtagaagaaacaacagcttacaagcctgtggtggaactggaagggccagccccaggaggggcatctgtgcactgggctttgaaggagcccctggtcccaagaacagagtctaatctcagggccttaacctgttcaggagaagtagaggaaatgccaaatactcttcttgctctcacctcactcctcccctttctctggttcgtttgtttttggaaaaaaaaaaaaaagaattacaacacattgttgtttttaacatttataaaggcaggtttttgttatttttagagaaaacaaaagatgctaggcactggtgagattctcttgtgccctttggcatgtgatcagattcacgatttacgtttatttccgggggagggtcccacctgtcaggactgtaaagttcctgctggcttggtcagcccccccacccccccaccccgagcttgcaggtgccctgctgtgaggagagcagcagcagaggctgcccctggacagaagcccagctctgcttccctcaggtgtccctgcgtttccatcctccttctttgtgaccgccatcttgcagatgacccagtcctcagcaccccacccctgcagatgggtttctccgagggcctgcctcagggtcatcagaggttggctgccagcttagagctggggcttccatttgattggaaagtcattactattctatgtagaagccactccactgaggtgtaaagcaagactcataaaggaggagccttggtgtcatggaagtcactccgcgcgcaggacctgtaacaacctctgaaacactcagtcctgctgcagtgacgtccttgaaggcatcagacagatgatttgcagactgccaagacttgtcctgagccgtgatttttagagtctggactcatgaaacaccgccgagcgcttactgtgcagcctctgatgctggttggctgaggctgcggggaggtggacactgtgggtgcatccagtgcagttgcttttgtgcagttgggtccagcagcacagcccgcactccagcctcagctgcaggccacagtggccatggaggccgccagagcgagctggggtggatgcttgttcacttggagcagccttcccaggacgtgcagctcccttcctgctttgtccttctgcttccttccctggagtagcaagcccacgagcaatcgtgaggggtgtgagggagctgcagaggcatcagagtggcctgcagcggcgtgaggccccttcccctccgacacccccctccagaggagccgctccactgttatttattcactttgcccacagacacccctgagtgagcacaccctgaaactgaccgtgtaaggtgtcagcctgcacccaggaccgtcaggtgcagcaccgggtcagtcctagggttgaggtaggactgacacagccactgtgtggctggtgctggggcaggggcaggagctgagggtcttagaagcaatcttcaggaacagacaacagtggtgacatgtaaagtccctgtggctactgatgacatgtgtaggatgaaggctggcctttctcccatgactttctagatcccgttccccgtctgctttccctgtgagttagaaaacacacaggctcctgtcctggtggtgccgtgtgcttgacatgggaaacttagatgcctgctcactggcgggcacctcggcatcgccaccactcagagtgagagcagtgctgtccagtgccgaggccgcctgactcccggcaggactcttcaggctctggcctgccccagcacaccccgctggatctcagacattccacacccacacctcattccctggacacttgggcaagcaggcccgcccttccacctctggggtcagcccctccattccgagttcacactgctctggagcaggccaggaccggaagcaaggcagctggtgaggagcaccctcctgggaacagtgtaggtgacagtcctgagagtcagcttgctagcgctgctggcaccagtcaccttgctcagaagtgtgtggctcttgaggctgaagagactgatgatggtgctcatgactcttctgtgaggggaacttgaccttcacattgggtggctttttttaaaataagcgaaggcagctggaactccagtctgcctcttgccagcacttcacattttgcctttcacccagagaagccagcacagagccactggggaaggcgatggccttgcctgcacaggctgaggagatggctcagccggcgtccaggctgtgtctggagcagggggtgcacagcagcctcacaggtgggggcctcagagcaggcgctgccctgtcccctgccccgctggaggcagcaaagctgctgcatgccttaagtcaatacttactcagcagggcgctctcgttctctctctctctctctctctctctctctctctctctctctctctctctaaatggccatagaataaaccattttacaaaaataaaagccaacaacaaagtgctctggaatagcacctttgcaggagcggggggtgtctcagggtcttctgtgacctcaccgaactgtccgactgcaccgtttccaacttgtgtctcactaatgggtctgcattagttgcaacaataaatgtttttaaagaac

SEQ ID NO: 836 - DNA, 8553 bp, Rattus norvegicus
  Genbank Accession No. NM_012647
accccctgtctttgcttttcctctttagtaaggatattattgcacatgtgagatttttacttcctactgtaggctgaattctagaaacctgcactggagactgctacattcaacacgcacatggattctgtgctatgattaccattccttttatttcagcactttcttacgcgaggagctaaacagtgactaaagaagcaggatgaaaagatggcacggtcagtgctggtacctccaggacctgacagcttccgcttctttaccagggaatcccttgctgctatcgaacagcgcattgcagaagagaaagctaagagacccaaacaggaacgcaaggacgaagacgatgaaaatggcccaaagccaaatagtgacttggaagcaggaaaatcccttccttttatttatggagacattcctccagagatggtgtcagaaccactggaggacctggacccctactatatcaataagaaaacctttatagtattgaataaggggaaagcaatctcgcggttcagcgccacctctgccctgtacattttaactcccttcaaccccattagaaaattagctattaagattttggtacattctttattcaatgtgcttatcatgtgcacaattcttaccaactgtgtgtttatgaccatgagtaaccctccagactggacaaagaatgtggagtatacttttacaggaatttatacttttgaatcacttattaaaatccttgcaaggggcttttgtctagaagatttcacatttctacggaatccctggaattggttggatttcacagtcattacttttgcgtatgtaacagaatttgtaaacctaggcaatgtttcagctcttcgaactttcagagtcttgagagctttgaaaactatttctgtaattccaggcctgaagactatcgtgggggccctgatccagtcagtgaagaagctctctgacgtcatgatcctcaccgtgttctgtctcagtgtctttgctctaatcgggctgcagctcttcatgggcaacctgaggaataaatgcttgcagtggcccccagacaattctacctttgaaataaatatcacttccttctttaataactcattggattggaatggtactgccttcaataggacggtgaacatgtttaactgggacgaatatattgaagataaaagtcacttttattttttggaaggacaaaacgatgctctgctttgtgggaacagctcggatgctggacagtgtccagaaggatacatctgtgtgaaggctgggagaaaccccaactacggctacacaagttttgacaccttcagctgggccttcttgtccttatttcgtctcatgactcaagacttctgggaaaacctttatcagctgaccttgcgtgctgccgggaaaacatacatgatattttttgtgctggtcattttcttgggctcattctacctgataaatttgatcctggctgtggtggccatggcctacgaggaacagaaccaggccacactggaggaggctgaacagaaggaggcagagtttcagcagatgctggagcaactgaagaagcagcaggaggaagctcaggcagcagctgcagcagcgtccgcagaatccagagacttcagcggggcaggcgggataggtgttttctcggagagttcgtcagtagcctcaaagttaagttccaaaagtgaaaaggagttgaaaaacagaagaaagaaaaagaaacagaaagaacaggctggggaggaagagaaggaagacgcggtgcggaaatctgcctctgaggacagcatacgaaagaaaggcttccagttttccctggaaggaagtagattgacctacgagaagagattttcctctccgcaccagtctctcttgagcatccgaggctccctattttctccaagacgcaacagtagagcaagccttttcaacttcaaaggtcgagtgaaggatattggttccgaaaatgactttgcagacgatgaacacagcacatttgaggacaacgacagcagaagagactctctatttgtaccacacagacatggagaaaggcgtcctagcaatgtcagccaggccagccgtgcctcccgggggatacccactctacccatgaatgggaagatgcacagtgcagtggactgcaacggtgtggtgtccctggttggaggcccctctgcgctcacatcgcctgtggggcagctgctgccggagggcacaactactgagacagaaataaggaagaggagatccagttcttaccacgtctctatggacttgttggaagacccttcaaggcaaagggcaatgagtatggccagtattttgacgaacactatggaagaacttgaagaatccagacagaaatgcccaccctgctggtataaatttgctaatatgtgcctgatttgggactgttgtaagccatggctaaaggtaaaacacgttgtcaatctggtagtgatggatccatttgttgacctggccatcaccatctgcattgtgttaaatacgctcttcatggccatggagcactaccccatgactgagcagttcagcagtgtgctgtctgttgggaatttggtcttcactgggatcttcacggcagaaatgtttctcaagataatagccatggatccatattattacttccaagaaggctggaatatctttgatggctttatagtgagccttagtttaatggaactcggcttggcgaatgtggaaggattgtcagttctccgatcattccggctgcttagagtcttcaagttggcaaagtcctggcccacactgaacatgctcattaagatcatcggcaactcggtgggtgcactgggcaacctgaccctggtgctggccatcatcgtcttcatttttgccgtggtcggcatgcagctgtttggaaagagctacaaggagtgtgtctgtaagatttccaatgattgtgagctcccgcgctggcacatgcaccacttcttccactccttcctgatcgtgtttcgagtcctgtgtggggagtggatagagaccatgtgggactgcatggaggtcgcgggccagaccatgtgccttactgtcttcatgatggtcatggtgattgggaaccttgttgtcctgaacctcttcttggccttgctcctcagttctttcagctcagacaacctggctgccacagatgacgataacgaaatgaacaacctccagatagccgtgggaaggatgcagaagggaattgattttgttaaaaggaagatacgtgaattcattcagaaagcctttgtcagaaagcagaaagctttagatgaaatcaaaccgctggaagatctgaataacaagaaagacagttgtatctccaaccacacgaccatagaaataggcaaggacctcaattacctcaaagatggaaacgggacgaccagtggcataggcagcagtgtggagaagtatgtggtagatgagagtgattacatgtcgttcataaacaaccccagcctcaccgtgactgtgcccatcgcccttggagagtctgactttgaaaacttaaacacggaagaattcagtagtgagtcagatatggaagaaagcaaggagaaattgaatgcaactagctcatctgagggcagtacggttgatataggcgctccggcagagggagagcagccagaggccgaaccggaagaatcgcttgaaccggaagcgtgtttcacagaagactgtgtgagaaagttcaagtgttgtcagataagcatagaagagggcaaaggcaagctctggtggaacttgaggaaaacgtgctacaagatagtagagcataactggtttgaaaccttcatcgtttttatgattctgctcagcagtggtgctctggcctttgaagacatttatattgagcagcgaaagaccatcaagaccatgctggagtatgctgacaaggttttcacttatatcttcatcctggagatgcttctaaagtgggtggcctatggtttccaaatgtatttcaccaatgcctggtgctggctggacttcctgatcgttgatgtctccttggttagcttaactgcaaatgccttgggctattcggaacttggtgccatcaagtccctccgaacgttaagagctctgagacctctacgagccttatcccgatttgaaggaatgagggttgttgtaaacgctctcttaggcgccatcccctccataatgaacgtacttctggtctgcctgatcttttggctaatattcagtatcatgggggtgaatctctttgctggcaagttctaccattgcatcaactacaccacgggggaaatgtttgatgtgagcgtggtcaacaactacagtgaatgccaagctctcattgagagcaatcagacggccaggtggaagaacgtgaaggtcaacttcgataacgtgggactcggatacctttctctgctccaagtagccacctttaaaggatggatggatatcatgtatgcagctgttgactcaagaaatgtagaactgcagcccaaatacgaagacaatctctacatgtacctttactttgtcatcttcatcatcttcggctcattcttcaccctgaacctgttcattggtgtcatcatagacaacttcaaccagcagaagaagaagtttggaggtcaagacatctttatgacagaagaacagaagaaatactacaatgcaatgaagaagctcggctccaagaaaccgcagaagcccattcctcggcctgcaaacaaatttcaagggatggtctttgattttgtaaccaaacaagtctttgacatcagcatcatgatcctcatctgcctcaacatggtgaccatgatggtggaaacggacgaccagagtcaggagatgaccaacatcctgtactggatcaacctggtgttcattgtcctgttcacgggcgagtgtgtgctgaagctcatctccctccgccattattatttcaccatcggctggaatatttttgattttgtggtagtcatcctctccattgtaggaatgtttctcgcggagctgatagagaagtatttcgtgtcccctaccctgttccgagtcatccgcctggccaggattggacgaatcctacgcctgatcaaaggcgccaaggggatccgcactctgctctttgctctgatgatgtcccttcctgcgctgttcaacatcggcctcctgcttttcctggtcatgttcatctacgccatctttgggatgtccaactttgcctacgttaagagggaagttggaattgatgacatgttcaactttgagacttttggcaacagcatgatctgcctgttccaaatcaccacctctgccggctgggacggactgctggcccctatactaaatagcggacctcctgactgtgaccctgaaaaagatcaccctggaagctcggtgaagggggactgtgggaacccatctgtggggattttcttttttgtcagctacatcatcatatccttcctggtggtggtgaacatgtacatcgctgtcatcctggagaacttcagcgtcgccaccgaagaaagtgcagagcctctgagtgaggacgactttgagatgttctacgaggtctgggagaagttcgaccctgacgccactcagttcatagagttctgcaagctttctgactttgcagctgccctggatcctcccctcctcatcgcaaagccaaacaaagtccagctcattgccatggacctgcccatggtgagtggagaccgcatccactgcctggacatcttgtttgcttttacaaagcgggtcctgggcgagagtggagagatggacgctcttcgaatccagatggaagaaaggttcatggcttccaacccctccaaggtctcttatgagcccattaccaccaccctgaaacggaaacaagaggaggtgtctgctattgtcatccagcgagcatacaggcggtatctcctgaagcagaaagttaagaaagtttcgtctatctataaaaaagacaaaggtaaagaagacgagggaacgcccatcaaagaagacatcatcacagataaactgaacgagaattcaactccagagaagactgatgtgacaccttccacaacttctccaccttcctacgatagcgtgacgaaaccggagaaggaaaaatttgaaaaggacaaatcagaaaaagaggacaaagggaaagatatcagggaaagtaaaaagtaaaaaaataaaataataataataataacgaaaattaaaaattaaaaaaaaagaatattccatttcgtgatcaactgtttacagcctgtgttggtgatgtatctgtgactccctcaggaggtccatgccaaactgactgtttctctaagtgtatacttaaggtcagtgcctataacaagacaggacctcgggtcagcacactgggattcaccaaaccagacaaagagcaccgacgggaggcttctatgttcacaaccagctgacactgctgaagagcggagagcaatggctactcagactagaagaacatggaaacggggaggaaagttaaatttttatgtaaatttaacatgtgacacttgatagcggtaactgtcaccactgtttgtgttttaactgccacacctgccatatttttacaaaatgtgtgctgtgactttatcactttttttttttgattcacgggttgtttactcttatatgtgactatttttgtaaacgggtttatgttcggggagagggattacggaggggattcgacgtttctctatgtataacgagatctattttcaacgaaggtaatgctgcagctctcattcacacacgacgatatcccatcacaccaggaaagagcttacttctcatttcaggatgtttttagattttttgaggtgcttaaatagctattcatatttttaaggtgtttcatccagaggaattttaatgtgcctgtaaatgttccatagaaccacaaccatcaaaaagagttgttttatttttacatagttcattatatgtacatgtatatatgtctatatgtatatggccgtgtatatacatatatatgtatacacacatgcatacatatgcacacacagaccatcacatgctcagagtcctgacagcatgactataacatttttttaataagtgtcctttggtaaaaaaaaatatatatacatatatatatatatctcctatcagtcctttctaagaaacccaaactaccaaaaaccacccccacggccactttctgaagttggttctgcttttttttccctgcagtattgtttagccatcttctgctcttggtaaggttgacatagtgtatgtcaattaaaaaacaacaacagcaacaaagtctgctttgtaaatagtaattttacccagtggtgcatgtttgagcaaatgaaaatgatttaagcacagtatttactgcatcaaatatgtaccacagttaagtatagtttgcaagctttcaacaggcgacatggtgtcactgggtcccttagagtttgaagctgtcaccgctgcatgtctctcttgctgatgccgctgtatcttaacccttctgctgttcagaagtctaacagggaagccatacgtcggtggcgaagtgaagcaaatcggtccaccaggaactcactcttcgtgacatgagccatgggttgcggtaaacgggaaggagatccttgttcttggttctcccaaaccttaatggaacagccggtgagatgtctgacagtgtaagctgcttagatctgttaaaagtatgtgcttcgagttttctaaggaaatatacatattgtaaaaaagggggggctcattttattttatttcaaagccttttgtacataaaatgggaaattaaaagtatcttcaggttgacgtcacagttctaccgttagtttctgttccccggcactttttaatcaaggcacttcgtcacggaagagataaggcctaagaggcagtgtagggctctggctgtcgttgttggtactgtggacttgcgcgtatttccacttgaaacaattctcattccaagtctaatgtccatttgctttcaatagtgatgccttatcattgacaagagatttcaaggggagcagatgacactcttggcattgcctgagtaggatgtcctcacctagtgtttctcctctactcatccatcttttttaatgttcgtttacacagatagatagatggatagatagaatcttactcatccacatggcaccagagctgtttcaggtatgattcgggaaccaagcgctctctctctctctctctctctctctctctctctctctctctctctctctctctctctgttttccacaaaaccagttagtgaaatgatatcgccaattacagccaaacactttgtttcacagacaaccttcaatgtagattctttatactaaagctgttgacttgtagcgtgttcatgaatgcatgcaggaaaatgctattaccatacagagctaccggtaagccacattacgatcaagccaaaagaataaagatttttttttttgcttt

SEQ ID NO: 837 - DNA, 5153 bp, Rattus norvegicus
  Genbank Accession No. NM_012654
ccagctccgggatagcgcagagggctgtgacgaagagcgcacgaggtaccacggtatgcgtgtcggctcctggagctgagcagcagcgatgtggcacccggctctgggaccagggtggaagccgctgctggcgctggccgtggccgtgaccagcctgcgaggcgtgaggggcattgaggaggaaccgaacagtggtgggagcttccagatagtcaccttcaaatggcaccacgtccaggatccatacatcatcgcactctggatcctcgtggccagcttggccaaaatcgtcttccatctgtcccacaaggtcaccagtgttgtcccggagagtgctctgctcatcgttctgggcctggtgctgggcggcatcgtctgggcagctgaccacatcgcctccttcacactcacacccacactcttcttcttctacctgctgccccctattgtgttggatgctgggtacttcatgcccaatcgactcttctttggcaacctgggcaccatcctgctatatgctgtcattggcactatatggaacgcagctaccacaggattgtccctctatggtgtcttcctcagtggcctgatgggcgaactgaagatcggcctcctggatttcctgctatttggcagcctcattgcagctgtggacccggtggctgtgctggctgtgtttgaggaagtccatgtcaatgaagtcctgttcatcattgtttttggggagtcactgcttaatgacgcggtgactgtggtcttgtacaatgtgtttgagtctttcgtgacgctgggtggtgatgcagtgactggcgtggactgtgtgaaaggcatagtgtccttcttcgtggtgagcctggggggcactctggtgggtgtcatcttcgccttcctgctgtccttggtgactcgtttcaccaagcatgtgcgtatcatcgagcctggcttcgtctttgtcatttcctacctgtcctatctgacctccgagatgctgtccttgtcagccatcctggccatcaccttttgtggcatctgctgtcagaagtacgtgaaggccaacatctcagagcagtcggccaccaccgtgcgctacactatgaagatgctggcaagtggagcagagaccattatcttcatgttcctgggcatctcggctgtggaccccgtcatctggacatggaacacagcttttgtgttgctgacactggtcttcatttctgtataccgagccattggtgttgttctgcagacctggatcctgaatcgctaccgcatggtgcagctagagaccattgaccaggtggtcatgtcctacggtggcctgcgtggggcagtggcctatgccttggtggtacttctggatgagaaaaaagtcaaggagaaaaacctgtttgtcagcaccactctcattgtggtcttcttcacagtcatctttcagggcctgaccattaagcccctggtgcagtggctgaaggtgaagaggagcgagcagcgtgagccgaagctcaacgagaagctgcatggccgggctttcgaccacatcctctcagccattgaggacatctcaggacaaattggacacaattacctcagagataagtggtccaattttgataggaagttcctcagcaaagtcctcatgagaagatctgctcaaaaatctcgagatcggatcctgaatgttttccatgagctgaatttgaaggatgccattagctatgtggccgagggagagcgccgtgggtccctggccttcattcgctccccaagtacggacaatatggtcaatgtggacttcagcacaccccgcccatctacagtggaggcatccgtctcctatttcttgagggaaaatgtcagtgctgtatgcctggacatgcagtccttggaacagaggcggaggagcatccgtgacaccgaggacatggtcacccaccacacgttgcagcagtacctctacaagcctcggcaggagtacaagcatctctacagtcggcacgagctcacacccaatgaggatgagaagcaggacaaggagatcttccacaggaccatgcggaagcgcctggagtcctttaagtcggctaagctgggcatcaaccagaacaagaaggcagccaagctatataagagggagcgcgcacagaagcggaggaatagcagcattcctaatgggaagctgcctatggagaatctggcacacaacttcaccatcaaggagaaagatttggaactttcagagcctgaggaggccaccaactatgaagagatcagtggaggcattgaatttctggccagcgtcaccaaagatgtagcctctgactctggggcaggaattgataatcctgtgttctcccctgacgaggatctggacccaagcatcctatccagggtgccaccctggctgtcccctggggagactgtggtgccctcccagagggcccgtgtccagattcccaactctcccagcaacttccgccgcctgactccattccgcctcagcaacaaatcagtggattccttcctgcaggctgatggccccgaggaacagctccaacccgcttcccctgagtccacacacatgtgatacaggctctggcacaccacttactggacgcttgtctcgtcagtcatctgctgctgcccagcacgcattgctccctgcagggcttgcccacccacgtgccccaagccccgccccacctgagcgcacttcgactgtcacttttgcctctggtgttcctgggacagagccagagcaccgggccccacccagtgcccacgctcggtcggcggctgcgcgccgggtacacagtaggcgctcattccaaaagcctcgcccacgccgacgcccagctctgctaaaactcgcttctcttccgggctctacagaactgccactgcacgctctggagcaagaagagacgccgctgtgatcgctgcctggccgatggcccagctccgagggtctccctcagtggcccctccccaaccagctagtgttcttagggtccaacgcaccctaggagttttaatgcatagcctagccctaggaagaatcttttaatccatatggtgtcctcaggataccacattgccacctgccgtcttcttgccctggttcagttcctagggctctgtggtgctgcctccccacccctacccagaggcgagcccttgttagtgtttgccacccttattctgagaggagaaagatccatgagaggcctgtagcggacttaatcactgctggtacaaacaaaggtctcaaaaattgagatttgtagaagtggcaccacccaaatcaacctcattctaaataggcagcagttttttgtgcgtccccagaatatacacccctgtggccctatctgaccccttccaagttagttctccagactgccctatcaccttatgatcaactgcagaaatatttggctcttctagctcagactttcctgtccagccccttccagcctgggccttgccgtcaaaaacaaggtgtccggcctgaactatccctaagttgggaacactgcagatggccaggcaagctgggctaggggctagaagtggcccactggaagccttccttggtcaaaattatagccagctctggcatctatcaaaggagggctctacatcacccaggagtagaggaatgcaggaatccagtctctgaacattttgtcctgtccctaggtcttcagggcctccgccttagaacattggccctctggagggtaagaggctgggccctcagcccttatcaacttcctcagaagtccagtgttcaagagtcacctgagttttgcttccaactcactagaaactttgcctgcaccacagggagatcgagatggggctaaaggtggacttaatgacttcctggagacttctgaaacaaagcactcaggtctctgctcaggaaactaaatactgtgtctcaggaacaaggttgacagttaccttcagaggagtcacaggaaagtctgtcaatctgtattaatgctgcagttgatttgtagacaggaagagagctgggaggagtgaaagcaaagcaagtccgcccaacatactgcatctgcttcagagtgtcgcccccccccccaactgagcctgccagtatgctgttgactgtctagttcacactcagccatcagatgctcagcatctggtttccacagcccttgaagcatttgtccctttccgaattgaagtccagccactgacaatgccagggtcagtaatttcaccagactatttggagctgccatttggggtacttccaaggcaggctgtgcttggctactgtacccggggtgttctgagaggcatctatcagcctctgctctgcagacaagtttctcagacctttctgtgccaggacactgccttaacacctcatccaatctgctggacatggggtccaattcccactgcagaattagaagccaagtgtgacgagacagtgcctcagcaactgtcaccttgctccagatacccagagataccaaagctagcagccgggggtgatcaatctgtggaaccctttgacactctgtccatgttttagctgtgcacaggccatgtcctttgagtgtgtgaactacaccactgggcatagccatatggaacagtcttgacaagaaagcctcattcacaaaaccccacttcctgtacctaaatgatacatacagtggctacatttcatagttgaggaccctcttgttcttgtcattgttgtacaatagaatgtaaaatcctatgaatgtatttccttaggaaaactattgtaaaagttttttttttattaggagagaatttctatttatttaatactgaactttgacctactttgtggtactacaaagtatacaaatttaggaaatttgtatttccgcttctgtattttcttgaaaataattttattacagtgttcaatatactatgtattaataatctttttatgaaaggaaatttaaagaactcatcaaaaccagaaatatattttgagtggttaaaattgtgtattaatgttgtgaacataatcatagttgaactttaattctgatctcagaataatgtgccttaaaatgcccccatgtgttgggcagcatctgtacaaggagtccattagcaaagctgcagtgact

SEQ ID NO: 838 - DNA, 2338 bp, Rattus norvegicus
  Genbank Accession No. NM_012674
tctacaaccatgaaggtagcaattatctttcttctcagtgctttggccctgctcagtttagcaggtaaccctccagctgaggtgaatggaaaaacgcctaattgccctaagcaaattatgggatgtcccaggatttatgaccctgtgtgtgggactaacggaattacttaccccagtgaatgcagtctgtgctttgaaaacaggaaattcggaacatctatccacattcagaggagagggacttgctgaatgtcctgattttgaaatcttttagggctaccataatgtttagcaagaaggtttgctgaataaatgcatctgaacatattttgttcttcccaaagcttttgctcaaaggcatatatgagtatattgagaatagggatctgagaagaaaaccagagtagagcaagctttaccacttagttcttcatgctcatacttcaaaaattgcagatgatgacaacacatagttgagcatgaacatgtgtaatgaatagagtttgggttaggatgaagaaggtagcctatctgtgcacaagaaagaagtagactgacttggatctttcttaggggagtttaccaaaggaaagactgccttgtatatctacagtgtttcacttgtgagacaccacaactctgcagatttactcttgttctgtgaggaaacttagaagagtcaaattgtttgactaatagtccaacatacatgatgccagggtgttcttttagatcaagctgacctcttccttcatccatatgagcactccttcttttaaccacaatcttctcttgtggatcatgccttgactttcttcaatgggaatcctagataatattccctactgtaagatcttgcatgtctatattcagtgatagaatatagacgtgatataataggatataaccaaatgaattagaaacaaggaaatattctcaaaagggaaagtatcaacaactacttttaaaaaaggaatcattttaagatcctgagtttctaaagaaaatcttagtctaagatggaaagagagtaaagagctaacacaggtgagtctgggcaaggaaccctagtacagtggggttgggtcagcacctttgccagaaataaccaagctattcagaaatacactaggaaaggagagttgcctagtaacccacttctggtcatattcagtattcatgccttgaactgaactcttgctcctagaggatgctataactaacaaaccgagcaacttaaacagcctgacagctctcaccaaataccttgctatctcaagttatggatgcaagatggctcccagtgtctatctgtgattctagaggacacttgaagggcaccaacacttaacaaattctgtgggggtaaatttattttaatcactggatgctggaagacacacacagagacacaaacacacaaagagagacagagagagagaaagagagagagagaggtagagagagagagagagagagagagggagagagagggagagagagagtgttttgggttttgttgttgttgttgttgttgatttggaattatatcaagatataagataatctcaaatgtatctttagtagttctgctccctggacccatgagaagacaggaatgaggattctgtgcatgtggtacttacatttcaaaaggagtatctaataaactggaaactgcttaaaagaatgagactatcagcactgataagaatataaagcttcaagctatgaagagtgattcaaagaaggaaaagaattccctcagaactgggaggaccttttaaaaaattctgagtccccgtttctaaagtttcaccttcctaacttcatgtattttttaatagctcaaagagtccaattactgctgctcatatactcatgagtgtgacaccatgcactgttactgccaatatatgaaaggccatacccctaaagaaaattgacttaagaactccttgtttagggttgggtacttctgtgaccctcccacattcatgctggaatgttgactggcttcatttttataaggcaaaagatcttcccactctcttctgagagagaataaatcagttttgctcaatggagtgattctgagtatactaatcacgatcccaggacaggccccattctcacaagcagttagctaacacaaatagaactccatattttatagcagtttttatcttttgttcttggttttagttcttattttcaagacagagaaaaacacatgaagttggaagggtagaagtgggggggggcgtgggtctgggaggagttgggggatagagaaaaatataataaaaatatatgaaattctcgagaatgaataaat

SEQ ID NO: 839 - DNA, 1638 bp, Rattus norvegicus
  Genbank Accession No. NM_012679
acccgcgtcaccaggaggagcgcactggagccaagccgcagacgggactccagactccaaagaggccacaccatgaagattctcctgctgtgtgtggcactgctgctgacctgggacaatggcatggtcctgggagagcaggagttctctgacaatgagctccaagaactgtccactcaaggaagtaggtatgttaataaggagattcagaacgccgtccagggggtgaagcacataaagaccctcatagaaaaaaccaacgcagagcgcaagtccctgctcaacagtttagaggaagccaagaagaagaaagagggtgctctagatgacaccagggattctgaaatgaagctgaaggctttcccggaagtgtgtaacgagaccatgatggccctctgggaagagtgtaagccctgcctgaagcacacctgcatgaagttctacgcacgcgtctgcaggagcggctcggggctggttggtcgccagctagaggagtttctgaaccagagctcacccttctacttctggatgaacggggaccgcatcgactccctgctggagagtgaccggcagcagagccaagtcctagatgctatgcaggacagcttcactcgggcgtctggcatcatagatacgcttttccaggaccggttcttcacccatgagccccaggacatccaccatttctcccccatgggcttcccacacaagcggcctcatttcttgtaccccaagtcccgcttggtccgcagcctcatgcctctctcccactacgggcctctgagcttccacaacatgttccagcctttctttgatatgatacaccaggctcaacaggccatggacgtccagctccatagcccagctttacagttcccggatgtggatttcttaaaagaaggtgaagatgacccgacagtgtgcaaggagatccgccataactccacaggatgcctgaagatgaagggccagtgtgagaagtgccaagagatcttgtctgtggactgttcgaccaacaatcctgcccaggctaacctgcgccaggagctaaacgactcgctccaggtggctgagaggctgacccagcagtacaacgagctgcttcattccctccagtccaagatgctcaacacctcatccctgctggaacagctgaacgaccagttcacgtgggtgtcccagctggctaacctcacacagggcgatgaccagtaccttcgggtctccacagtgacaacccattcttctgactcagaagtcccctctcgtgtcactgaggtggtggtgaagctgtttgactctgaccccatcacagtggtgttaccagaagaagtctccaaggataaccctaagtttatggacacagtggcagagaaagcgctacaggaataccgcaggaaaagccgcatggaatgagacagaagcatcagttttctatatgtaggagtctcaaggagggaatctcccagctttccgaggttgctgcagacccctagagaactccacatgtctccagcgcctaggcctccaccccagcagcctctccttcctctgggttctgtactctaatgcctgcacttgatgctctcgggaagaactgcttcccccacgcaactaatccaataaagccaccttgcg

SEQ ID NO: 840 - DNA, 1417 bp, Rattus norvegicus
  Genbank Accession No. NM_012696
agagggaacctttaatcatgaagctaattactatcctgctcctctgctccaggctcctgccaagtttagcgcaggaagaaggcgcccaggaattgaactgcaatgatgagactgtatttcaggctgtggatactgctctgaagaaatataacgctgagttagaaagcggcaaccagtttgtgttgtaccgagtgactaagggcactaagaaggatggcgctgaaacattgtattccttcaagtatcaaatcaaggagggcaactgctctgttcagagtggcctcacctggcaggactgtgacttcaaggacgctgaggaagccgctactggcgaatgcacaacaactttggggaagaaagaaaataaattctccgtagccacccagatctgcaatattactccaggtaagggtcctaagaagacagaggaggacctctgtgtcgggtgtttccaacccataccgatggatagctcagacctgaagcctgttctgaaacacgctgtggagcattccaacaacaacacgaagcacacccacctctttgctctcagagaagtaaagagtgcccactcacaggtggtggctggcatgaattataaaattatctactccattgtgcaaacaaattgttcaaaggaggattttccttccctccgtgaagactgtgtaccccttccctatggcgatcatggtgagtgtacgggtcatacccacgtggatattcataacacaattgccggcttctcacagagctgtgacctttatccaggagatgatttgtttgaactacttcccaagaattgccgtggctgccccagggagatacctgtagacagcccggagctgaaggaggcacttggtcattccattgcacagcttaatgcacagcataaccatattttctatttcaagattgacaccgtgaaaaaggcaacatcacaggtggttgctggagtaatatatgtgattgagttcatagccagagaaactaactgttccaagcaaagtaaaacagaactgacagcggattgtgagaccaaacacctcggtcaaagcctcaactgcaatgctaacgtgtacatgagaccttgggagaacaaagtcgtcccgactgtcagatgccaagcactagatatgatgatttctaggcctccaggattttcacctttccggctggtgcgagtacaagaaactaaagaaggaacaactaggctcctaaactcatgtgagtacaagggcagactctcaaaggcaagggcaggcccagcacctgaccatcaggcagaagcttcaaccgtgacatcatagcctggcaaagacccggagtggaaggaccagaagactcctgggatgtgtgcagtatggaagcatgtttcttcatcacctgatcctgggtgaaataaagttcagactcg

SEQ ID NO: 841 - DNA, 1253 bp, Rattus norvegicus
  Genbank Accession No. NM_012704
cgccgtcctccagcgcgctccgctgcaaccccgcagctgagcccagaggctccggccctgtgcgccctaccgcggccccgccactatggccggcgtgtgggcgccggagcactcggttgaagcgcacagcaaccagtcaagtgctgccgacggctgcggctctgtgtccgtggccttccccatcaccatgatggtcactggcttcgtgggcaacgcgctggccatgttgcttgtgtcgcgcagctatagacgccgggagagcaaacgcaaaaagtctttcctgctgtgcattggctggctggcgctcaccgacttggtggggcagctcctgaccagtccggtggtcatcctcgtgtacctgtcgcagcgacgctgggagcaactcgacccatcggggcgcctgtgcaccttcttcgggctgaccatgacagtgttcggactgtcctcgctcttggtggccagcgccatggccgtggagcgcgccctggctatccgtgcgccgcactggtatgccagccacatgaagactcgcgccacgcgcgcggtactgctgggtgtgtggctgtctgtgctcgccttcgcgctgctgcctgtgctgggcgtgggccgctacagcgtgcagtggcccggcacgtggtgcttcatcagcaccgggccggcgggcaacgagacggactctgcgcgggagccgggcagcgtggcctttgcctccgccttcgcctgtctaggcttgctggctctggtggtgacctttgcctgcaacctggcgaccatcaaagccctggtgtcccgctgccgggccaaagccgccgcctcgcagtccagcgcccagtggggccggatcaccacggagacggctatccagcttatggggatcatgtgtgtactgtccgtctgctggtcgccgctattgataatgatgctgaaaatgatcttcaatcagatgtcagtagagcaatgcaagacgcagatgggaaaggagaaggagtgcaattccttcctaatcgccgttcgcctggcttcgctgaaccagatcttggatccctgggtttatctgctgctaagaaagatccttcttcgaaagttctgccagatgatgaacaacctgaagcggagtttcattgcaatacctgcttccctgagtatgagaatttcttcccccagggaaggataactgaatcattttggattgtatcttctttcggcctcatattttaagttttccttgccattaaacacaccgagacaagctt

SEQ ID NO: 842 - DNA, 601 bp, Rattus norvegicus
  Genbank Accession No. NM_012733
atgcctgtggacttcaacgggtactggaagatgctgagcaacgagaatttcgaggagtacctgcgtgcgctcgatgtcaacgtggccttgcgaaaaatcgccaacttgctgaagccggacaaagagatcgtgcaggatggcgaccacatgatcatccgcacgctgagcacttttcgaaactatatcatggacttccaagttgggaaggagttcgaggaggatctgacaggcatagatgaccgcaagtgcatgaccacagtgagctgggatggtgacaagcttcagtgtgttcagaagggagagaaggagggacgtggctggacccagtggattgagggtgatgaacttcacctggagatgagagcagagggtgtgacctgcaagcaagtgttcaagaaagtacactgagcggcccgagcagataaccttggtctcgaggaacaagtgggatggcccaatggtcaggagccctctctgcctagcacagggctgaaacacatagccaccccaggtttctgccagcagagtctgtctcattgccttgtctcttttccttttcttaaaatgaagctaccccaataaaaatgatctctgtttaaga

SEQ ID NO: 843 - DNA, 3945 bp, Rattus norvegicus
  Genbank Accession No. NM_012744
cgcggcggccacggcttgaggcgacggggcgaagatgctgaagttccaaacagttcgagggggcctgaggctcctgggtgtccgccgatcctccacagcccccgttgcctccccaaatgtccggcgtctggagtacaagcccatcaagaaagtaatggtggccaacagaggtgagattgccatccgagtgtttcgtgcctgcacagagctgggtatccgcacagtggctgtctactcggagcaggacacaggccagatgcaccggcagaaagctgatgaagcctaccttattggccgtgggctggctcctgtgcaagcctacctgcacattccagacatcattaaggtggccaaggagaatggtgtagatgctgtgcaccctggctatgggttcctctcagagagagcagactttgcccaggcctgccaagatgctggagtccgattcattggtccaagcccagaggtggtccgcaagatgggagacaaggtggaagcccgggccattgccattgctgcaggcgttccagtggtccctggcactaattcccccatcaattccctgcatgaggcacacgagttctctaacacctatggtttccctattatcttcaaggctgcctatggaggtgggggccgtggcatgagggttgtgcatagctacgaggagctggaagagaattacacccgggcctaccctgaggccttggcagcctttgggaatggggcattgtttgtggagaaattcattgagaagccaagacacattgaggtgcagatcctaggggaccaatatgggaacatcttgcacttgtatgagcgggactgctccatccagcggcggcaccagaaggtggtagagattgcccctgctacccacctggacccccaacttcggtcacgcctcaccagtgactctgtcaaacttgccaagcaggttggctatgagaatgcaggcactgtggagttcctggtggacaagcatggcaagcactacttcatcgaggtcaattcccgcctgcaggtggagcacacggtcactgaggagattacagatgtggacctggtccatgctcagatccatgtgtccgaaggccggagcctgcctgacctaggcctgcggcaggaaaacatccgaatcaatggttgtgccattcagtgtcgggtcaccactgaggaccctgcacgcagcttccagccagacactggccgcattgaggttttccggagtggtgagggcatgggcatccgcctggacaatgcctcagcattccagggagctgtcatatccccccactatgactccctgctcgtcaaagtcattgcccatggcaaagaccaccctacagctgccaccaagatgagcagagccctggcggagttccgtgtccgaggtgtaaagaccaacatccccttcctgcagaatgtgctcaacaaccagcagttcctagcgggcattgtggacacccagttcatcgatgagaaccccgagctgttccagctgcggcctgcacagaaccgggcccagaagttgctacattaccttggacacgtcatggtcaatggccctaccactccaatccccgtcaaggtcagtcccagccctgtggaccccattgttcctgtggtgcccataggcccacccccagctggtttcagagacatccttctgcgagaggggccagagggctttgccagagctgtgcggaatcaccaggggctgctgctaatggacacaaccttccgggatgcccaccagtcactacttgccactagagtgcgcacacacgatctcaaaaagattgcaccctacgttgcccacaacttcaacaacctcttcagcatagagaactggggaggagccacatttgacgtggccatgcgcttcttgtatgagtgcccctggcggcggctccaggagctccgggagctcatccccaacatcccattccagatgctactgaggggggccaatgctgtgggctacaccaactaccctgacaacgtggtcttcaagttctgtgaggtggccaaagagaatggcatggacgtcttccggatctttgactcccttaactacctgccaaacatgctgctgggcatggaagcagctggcagtgctgggggtgtggtggaagctgccatctcctacacgggtgacgtggctgaccccagtcgcactaaatactcactggagtactacatgggcttagctgaagaactggtgcgagccggcactcacatcctctgcattaaggacatggcaggcctgctgaagcctgcagcatgcaccatgctggtcagctccctccgggaccggttccccgacctcccactgcacatccatacccatgacacatcagggtcaggtgtggcagccatgttggcctgtgcacaagctggggctgatgttgtggatgtggcagtcgactctatgtctgggatgacctcacagcccagcatgggggccctggtggcctgtaccaaagggactcctctggacacagaggtacccctggagcgtgtgtttgactacagtgagtattgggaaggggctcgggggctgtatgcagcctttgattgcacggctaccatgaagtctggcaactcagacgtgtatgagaatgaggatccagggggccagtacaccaacctacacttccaggcccacagcatgggacttggctccaagttcaaggaggtcaagaaggcctatgtggaggctaaccagatgctgggggacctcatcaaggtgacaccatcctccaagattgtgggggatctggcccagttcatggtgcagaacgggttgagccgggcagaggcagaagctcaggcagaagagctgtccttcccccgctctgtggtggagttcctgcagggctacattggcattccccatgggggtttccctgaacccttccgttctaaggtgctaaaggacctgccaaggatagaaggagggcctggagcctccctccctcccttgaacctgaaggagctggagaaggacctgattgataggcatggagaggaggtgaccccagaggacgttctctctgcagccatgtaccctgatgtctttgctcagttcaaagacttcacggctacctttggccccctggatagcctgaatactcgtctctttcttcaaggacccaaaattgcagaggagtttgaggttgagctggaacggggcaagaccttgcacatcaaagccctggctgtaagcgacctgaaccgtgctggccagaggcaggtgttctttgaactcaatgggcagcttcgatccattctggttaaagacacccaggccatgaaggagatgcacttccatcccaaggccttgaaggatgtgaagggccaaattggggcccctatgcctgggaaggtcatagacgtcaaggtggcagcaggagccaaggtggttaagggccagcccctctgtgtgctcagcgccatgaagatggagactgtggtgacttcgcccatggagggcactatccgaaaggttcacgtgaccaaggacatgactctggaaggcgatgacctcatcctagagattgagtgatcttactccagactggcagcctggccaaccctaccccaagcctctcaacagaagctgtgcagccagggcaggcccaggcagtacctgagggctaggccttgaggtcctgtcccatgggacagcacacacactacctgcaatggccctcccattcccttcagctatttgtccttgtcttgctggcaggcagttctcacatattcatctcttgccaaataagggtctgctcctcgtgggagaccacaggtgtacagtaggtggccttgtacctgggagaggggttctacctctgggggtagagggaagaagacctaattcataggtcctgggaaatttgctcaataaaagtggccttcccttgccctccacaaaaa

SEQ ID NO: 844 - DNA, 2924 bp, Rattus norvegicus
  Genbank Accession No. NM_012747
atggctcagtggaaccagctccagcagctggacacgcgctacctggagcagcttcatcagctgtacagcgatagcttccccatggagctgcggcagttcctggcgccttggattgagagccaagattgggcatatgcagccagcaaagagtcacacgccactctggtgtttcataacctcttgggcgagatcgaccagcagtatagccgattcctgcaggagtccaatgtcctctatcagcacaacctgcgaagaatcaagcagttcctgcagagcaggtatcttgagaagccaatggaaattgcccggattgtggcccgatgcctgtgggaagagtctcgcctcctccagacggcagccacggcagcccagcaagggggccaggccaaccaccccacagctgccgtagtgacggagaagcagcagatgctggaacagcatcttcaggatgtccggaagcgtgtgcaggatctagaacagaaaatgaaagtggtggagaatctccaggatgactttgatttcaactataaaaccctcaagagtcaaggagacatgcaggatctgaatggaaacaaccagtctgtgaccagacagaagatgcagcagctggagcagatgctcacggccctggaccagatgcggaggagcatcgtgagcgagctggcagggctcttgtcagcaatggagtacgtgcagaagacactgaccgatgaagagctggctgactggaagaggcggcagcagatagcgtgcatcggaggccctcccaacatctgcctggaccgtctggaaaactggataacttcattagcagaatctcaacttcagacccgccaacaaattaagaaactggaggagctgcagcagaaagtgtcctacaagggggaccctattgtgcagcaccggccaatgctggaggagaggatcgtggatctgttcagaaacttaatgaagagtgccttcgtggtggagcggcagccctgtatgcccatgcacccggaccggcccttagtcatcaagactggtgtccagtttaccacaaaagtcaggttgctggtcaaatttcctgagttgaattatcagcttaaaattaaagtgtgcattgataaggactctggggatgtcgctgccctcagagggtctcggaaatttaacattctgggcacgaacacaaaggtgatgaacatggaggagtccaacaacggtagcctgtctgcagagttcaagcacctgaccctgagggagcagagatgtgggaatgggggccgtgccaattgtgatgcctccttgattgtcactgaggagctgcacctgatcacctttgagacagaggtgtaccaccaaggtctcaagatcgacctagagacccactccttgccagtcgtggtgatctccaacatctgtcagatgcctaatgcttgggcatcaatcctgtggtataacatgctgaccaataaccccaagaacgtgaacttcttcactaagcctccgattggaacctgggaccaagtggccgaggtgctgagctggcagttctcgtccaccaccaagcgagggctgagcatcgagcagctgaccaccctggccgagaagctcttagggcctggtgtgaactactcagggtgtcagatcacatgggctaagttttgcaaagaaaacatggccggcaagggcttctcgttctgggtctggctagacaatatcatcgaccttgtgaaaaagtatatcttggccctttggaatgaagggtacatcatgggtttcatcagcaaggagcgggagagggccatcctaagcacaaagcccccgggcaccttcctgctgcggttcagtgagagcagcaaggaaggaggggtcactttcacttgggtggaaaaggacatcagtggcaagacccagatccagtctgtagaaccatataccaagcagcagctgaacaacatgtcatttgctgaaatcatcatgggctataagatcatggacgctaccaacatcctggtatccccactggtctacctctaccctgacattcccaaggaggaggcattcggaaagtattgtcgccccgagagccaggagcaccctgaagctgacccaggtagtgctgccccttacctgaagaccaagttcatctgtgtgacaccaacgacctgcagcaataccattgacctgccgatgtccccccgcactttagattcattgatgcagtttggaaataacggtgaaggtgctgagccctcagcaggagggcagtttgagtcgctcacgtttgacatggatctgacctcggagtgtgctacctccccgatgtgaggagctgaaaggcaaagctacagagtatgactgagacactgcccatgtcaccttagcagcaactcagatcactgaactcactgtgtccagattttttctttaacctcctacttctgctgtctttgggcagtctgggtactttttaaaatagagaactgagtgagcgtgggtgatgcgctcttatgtgaggaggagggcacctcttgagtccgtgatggctgtgaaagcagagggctgggggggagcgaaaggaaacacctatgttctgtccgcctgtcctcctggtttgttgttgacaagcgcctcctggtgccatggcatcctgctgcccctttctgtgagctgataccccaggctgggactcccggctctgcactttcaacctggttaatgtccacatagaagctaggactaagcctataggcttctctttaagttaaaaaaaaaaaaaatactaagaattaaagggcaaaacacactgaaaacagcatagcctttccatatcaaagaaaactcgggtaacagccttttcggtgctttaagctgtcttaggctgatcatttatataaactctgcaatggttcaatcaatctgtaaagacagctgagaac

SEQ ID NO: 845 - DNA, 2142 bp, Rattus norvegicus
  Genbank Accession No. NM_012749
atggtgaaactcgcaaaggccggcaaaacccacggagagtccaagaaaatggctcctcctccaaaggaggtggaagaagatagtgaggatgaagaaatgtcagaagatgaagatgacagcagtggagaagaggaggttgtcatccctcagaagaaaggcaaaaaggctaccacaactccagcaaagaaggtggttgtttcacaaacaaaaaaggctgcagttcccacaccagctaagaaagcagctgttaccccaggcaaaaaggcagcagccacaccagccaagaaagctgttacaccagccaaagtagttccaacacctggtaaaaagggagctgcacaagcaaaagcattggtaccaactcctggtaaaaagggagctgtcactccagccaagggggctaagaatggtaagaatgccaagaaggaagacagcgatgaggatgaagatgaagaggatgaagatgacagcgatgaggatgaagatgaagaggatgaatttgagccaccggtagtaaaaggagtgaaaccagcaaaagcagctcctgctgctcctgcctcagaggatgaggatgaggaagatgatgatgatgaagatgatgatgatgatgatgaagaggaggaggaggaagatgactctgaggaagaagttatggagatcacaccagccaaaggaaagaaaactcctgcaaaagttgttcctgtgaaagccaagagtgtggccgaggaggaggaagatgatgaggatgatgaagatgaagaggaggatgaagatgaagaagatgaagaggacgatgaagatgaggatgaggaagaagaggaagaacctgttaaagcagcacctggaaaacggaagaaggagatgaccaagcagaaagaagcccctgaagccaagaaacagaaaatagaaggctcagaaccaactacacctttcaacctgttcattggaaaccttaatccaaacaagtctgttgctgaattaaaagttgccatcagtgaactttttgctaaaaatgatcttgctgctgtggatgtcagaactggtacaaataggaaatttggttatgttgattttgagtctgctgaagacctagaaaaggccctggagctcactggtttaaaagtgtttggcaatgaaattaaactagaaaaaccaaaaggaagagatagtaagaaagttcgagctgcaagaacacttttagccaaaaacctctctttcaacatcactgaggatgaattaaaagaagtgtttgaagatgctgtggagatcagattagtcagccaggatgggagaagtaaagggattgcttatattgaatttaagtctgaggctgatgcagagaaaaacttggaagaaaagcagggggcagaaattgatggacggtctgtttcactctactacactggagagaaaggacaaaggcaagagagaactggaaagaatagcacttggagtggtgaatcaaagactttggttttaagtaacctttcctacagtgcaacagaagaaacacttcaggaagtattcgagaaagcaacctttattaaagtgccccagaacccacatggcaaatctaaagggtatgcatttatagaatttgcttcatttgaagatgctaaagaagctttaaattcctgtaataaaatggaaattgagggcagaacaatcaggctggagttgcaaggacccaggggatcacctaatgcgagaagtcagccatccaaaactctgtttgtcaaaggtctgtctgaggataccactgaagagaccttaaaagaatcatttgagggctctgttcgtgcaagaatagtaactgatcgggaaactggttcttctaaagggtttggttttgtagactttaatagtgaggaagatgccaaagctgccaaggaggccatggaagatggagaaattgatggaaacaaagttaccttggactgggccaaacctaagggtgaaggtggctttggtggtcgaggtggaggcagaggaggtttcggaggcagaggtggtggcagaggcggaagaggcggatttggcggaagaggccggggagggtttggaggcagaggaggcttccgaggcggcagaggaggcgggggagacttcaagccacaaggaaagaagacgaagtttgaatag

SEQ ID NO: 846 - DNA, 1703 bp, Rattus norvegicus
  Genbank Accession No. NM_012752
ggcacgagtctccacgcaccggagcatccagagagtcgccgcgcgccgacggagcggacatgggcagagcgatggtggtcaggctagggctggggttgctgcttctggcactgctcctacccacgcagatttattgcaaccaaacatcggttgcaccattttccgggaaccagagtatctctgctgccccaaatccaactaatgctaccaccagatctgggtgtagctccctgcagtccacagccggtctcctggccctctctctctctctcctacatctctactgttagagactcaggccaagaaacgtctctacttccccatctagacccaccccgaatggcaaccacaagtccaatgtgagtgaccaggaagagacaggtccacatcaaatcggctgttaccattacctcaacagaaaacactgagaatccgaaattcgactggcttaaaggacgcgtgaagggtttgagagctgagagatgccaatatgggatctgctggagttttatgtccgagatgaagacaagcatccaaaattgacgtgatttgctcgaaatgtggcttaagaaatgtggacacttaaaactctcactcgaaatcgggcgtaggtttgatgtagagggagaaggatggggtgtggaatggaggtccattattttcattggttccttcgacctataaggccataatgcagttaggtggtattcaaaagcttctctgatgctatttctgtgtatgttggaaggaactaccaggtgttattttaaatccccgatgtgttgttttgttactactaatttaataggctaaactctaggtgaagtcccacgtcgttgacctctagttcttctctccggaacagaacgttttacaccctccttctgtggctttaggtcacccacccccaaatccagccacccctgagtaaatctgatttcaaaagtcacaacggcaaagcatttcccagtgtcttttctcactcaccacgggtactaagttcacttaggtgagctggttctccagagagcagaattctgttgatctcggctaatctccaaacgctgcgttttattttggcatatgtcgagggcttttcatgatttaaagcgtggtctgttagcaaggccaaaattatgagtcttgaaattctacaggcaaatatgcaacccagcatttgggatgtgaggactggaagctctcacagaattacacaaagtcttttatacaatttctgtaaatacttttttttttttaaagagaaaaacaaaaccatggatcggaataaccacgtttggaatactttggttatcagttcatatttttagatagtttgacattggtcctgtgcctgagagggggtttggttctacagtaagtttttttttcccccaatttccttgatacacacataccttctaaaacacagacatttcctcaaaaaaaaaaaaaaattccttttgttcgcatggtcacacactgatgcttgccattctgggatctaatacggtcacagtagtcttgataaccagaatcatttttttctccgtctttagaaacctacccgggaacaaggagacctcacagacccgaagctactgtgtgtgtgaatgaacactccccttgcctcatacccgaatgctgtacatctatttgattgtatattgtgtttgtgtattgtaaataaaagaaagaaatggctg

SEQ ID NO: 847 - DNA, 2335 bp, Rattus norvegicus
  Genbank Accession No. NM_012770
ctccagtggctgagtgatcaactatactcgatgtatcttccagggcttctgcagaagtgcaagatgtcttcatgacctacaccgtgtatgatgacatcatcaccattaagctcatccaagaagcctgcaaggttctggatgtgtccatggaagccattctgaagctctttggcgaatacttctttaagttctgtaagatgtctggctatgacaggatgctgcggacacttggaggaaatctcaccgagtttattgaaaacctagatgcactccacagttacctggcactgtcctatcaggaaatgaacgcaccatcctttcgagtggaggaaggagctgacggggcgatgcttctccactactactcagacagacatggtctgtgtcacattgtaccaggtatcattgaagctgtggccaaggacttctttgacactgatgtggccatgagtatcctggatatgaacgaagaggtggaaaggacagggaagaaagaacatgttgtgtttctggtcgtgcagaaggctcacagacagataagaggagcaaaggcaagccggccacaaggcagtgaggacagccaggcagaccaggaggctctccagggaacactccttcggatgaaggagagatatttaaacatccctgtttgccctggggagaaatctcactcaactgctgtgagggcatcggtcctttttggaaaagggcccctcagggacaccttccagcccgtctatcctgagagactatgggtcgaagaggaggtgttctgtgatgcttttcctttccacattgtctttgatgaagcactaagggtcaagcaagctggagtgaatattcagaagtatgtccctggaatcttaacccagaagtttgcactagatgagtatttttccatcatccaccctcaagttactttcaacatctccagcatctgcaagttcattaacagtcagtttgtcttgaagacaagaaaagaaatgatgcccaaagcaaggaagagccagccgatgctcaaactccggggtcagatgatctggatggagtctctgaggtgcatgatcttcatgtgttccccaaacgtccgcagcctgcaagagctggaagagagcaagatgcatctttctgatatcgctccgcacgacacgaccagggatctcatcctcctcaaccagcagaggctggcagagatggagctgtcctgccaactggaaaagaagaaggaggagttgcgtgtcctttccaatcacctggccatcgagaagaagaagacagagaccttgctgtatgccatgctgcctgaacatgtggccaaccaactcaaggagggcagaaaggtggctgcaggagaatttgaaacatgtacaatccttttcagcgatgttgtgacatttaccaacatctgtgcagcctgtgaacctatccaaatcgtgaacatgctgaattcaatgtactccaagtttgacaggttaaccagtgtccatgatgtctacaaagtagaaacaataggggatgcttacatggtggtgggtggagtaccagtacccgttgaaagccatgctcaaagagtcgccaattttgctctggggatgagaatttctgcaaaagaagtgatgaatcctgtcactggggaacctatccagatcagagtgggaatccacactggaccagtcttagcaggtgttgtgggagacaagatgcctcggtactgcttgtttggtgacactgtaaacacagcctctaggatggaaagtcacgggcttcccagcaaagtgcatctgagccccacagcccacagagccctgaaaaacaaagggtttgaaattgtcaggagaggcgagatcgaagtgaaggggaaaggaaagatgaccacatactttctgatccagaacctgaatgccaccgaggatgagataatggggcgaccttcagcccccgctgatgggaaggaagtatgtactcccggaaaccaagtcaggaagtcccctgctgtcccgaggaacacagaccatcagcaacaagtctacaaaggagacccagcagacgcttctaatgaagtcacacttgctgggagcccagtggcagggcgaaactccacagatgcagtcaataaccagccatcaccagatgagaccaagacaagtgtcgttgctagtggccctgtgctgtctgctttctgtgttgtgctgtgatcacgagaaaaagtgatcctatgggatccatttcctgtattccatggcagcaaagggaattaatttataaaaatgcttaagttcaaaatgtttttgtttccatatctcccttggggcccctttgagaataaaaaaattag

SEQ ID NO: 848 - DNA, 4835 bp, Rattus norvegicus
  Genbank Accession No. NM_012789
gagcagaggcgcaggacgtccgtctccgcgcgcgtgacttctgcctgcgctcaagcttcagagttcagtttcaaggagccgcccaaccatgaagacaccgtggaaggttcttctgggactgcttggtgtcgctgcgcttgtcaccatcatcaccgtgccagtggttctgctgaacaaagatgaagcggccgctgatagcgcgagaacttacacactagctgactatttaaagaatacctttcgggtcaagtcctactccttgcggtgggtttcagattctgaatacctctacaagcaagaaaacaatatcttgctattcaatgctgaacacgggaacagctccattttcttggagaacagtacctttgagatctttggagattctataagtgattattcagtgtcacccgacagactgttcgttctcttagaatacaattatgtgaagcaatggagacactcctacacggcttcatacagtatttatgacttgaataaaagacagctgatcacagaagagaagattccaaataatacacagtggatcacatggtcacaagaaggtcacaaattggcatatgtctggaagaatgatatttatgttaaaattgaaccacatttgcctagtcataggatcacatcaacaggaaaagaaaatgtaatatttaacggaataaatgactgggtttatgaagaggaaatcttcggtgcctactccgcactgtggtggtctccaaacggcacttttctagcttatgcccagtttaacgacaccggagtgcctctcattgaatactccttctactctgatgagtcactgcagtaccccaagacagtctggattccgtacccaaaggcaggagctgtgaatccaactgtaaagttctttattgtaaatacagactctctcagctcaactactactacgattcccatgcaaatcaccgctcctgcatctgtgacaacaggggatcactacttgtgtgacgtggcctgggtttcagaagacagaatctcgttgcagtggctcaggaggattcagaactattccgtgatggcgatctgcgactatgataagaccaccctagtatggaactgtccaacgacgcaggagcatattgaaacgagtgccacaggctggtgcggaagatttaggcctgcagaaccccacttcacctccgacggaagcagcttctataaaatcgtcagtgacaaagatggctacaaacacatctgccagttccagaaagataggaaacccgaacaggtctgtacatttattacaaaaggagcctgggaagtcattagtatcgaagctctgaccagcgattatctgtactacattagtaatgaatataaagaaatgccaggaggaagaaatctttataaaattcagcttactgaccacacaaataagaagtgccttagttgtgacctgaatccagaaagatgccagtattactcggtgtcacttagtaaagaggcaaagtactatcagctgggatgccggggccctggtctgcccctctacactctgcatcgcagcactgatcaaaaagagctgagagtcctggaggacaattctgctttggataaaatgctgcaagatgtccaaatgccttcaaaaaaattggacttcattgttctgaatgaaacaagattttggtatcaaatgatcttacctcctcattttgataaatccaagaaataccctctactaatagatgtatatgcaggtccctgtagtcaaaaagcagatgctgccttcagactcaactgggccacttaccttgcaagcacagaaaacatcatagtagctagctttgatggcagaggaagtggttaccaaggagataagatcatgcatgcaatcaacaaaagacttggaacactggaagttgaagatcaaattgaagcagccaggcaatttttaaaaatgggatttgtggacagcaagcgagttgcaatttggggctggtcatatggagggtacgtaacctcaatggtcctgggatcgggaagtggcgtgttcaagtgtggaatagccgtggcgcccgtgtcacggtgggagtactatgactcagtatacacagagcgttacatgggtctcccaactccagaggacaaccttgaccattacaggaactcaacagtcatgagcagagctgaaaattttaagcaagttgagtacctccttattcacggtacagcagatgataatgttcactttcagcagtcagctcagatctccaaagccctggtggatgctggcgtggatttccaagcaatgtggtacacggacgaagaccatgggatcgccagcagcacagctcaccagcacatctattcccacatgagccatttcctccagcagtgcttctccttacgctagcatggcaaggctctccgcagcttactcaagagcacacttgtcctcattatctcaaaactgcactgttaagatgacgattttaataatgtcgcctcgagaaattccagcctacttcccagttttatacctgcaatcctaactaaggatgcctgtcttcagaacagattattaccttacagcaatttggatttccccctctgttttgtttatcatttaaaaccatttccacatcagctgctgaaacaacaaatataaattatttttgcaagagctatgcatagatttcctgagcagaatttcaatttttttcccccttactaggctggtccaaatcttgttcccttatttaagggggtggcaagacgtgggtaatgatgtcattaggccagcaacaagagaagcgggaacagagaatatggctagaaacccaggtccaagcatacaaacccaaccaggctactgtcagctcgcctcgagaagagctgctcactgccagactggcaccgttttctgagaaagactattcaaacagtctcaggaaatcatatatgcaaagcactgacttctaagtaaaaccacagcagttgaatagactccaaagaaatgcaagggacgctgccagcaatgtaagggccccaggtgccagttatggctataggtgctacataaacacagcaagcctgatgggaaagcatgttaaatgtgcttttaaaaattaccaagtctcctagtgagaagaggcagcttggaacatagcgacttgccccgttaaaagttgaaaatatttgtgtcacaaattctaacatgaaggaatacttgcgtcagttcttcctacttcctttctttgagcattttcattaaagcattttaacttcattatctttctaatggaaaactgtatgagaatgttttgtgttattatttctattctacacactggaatgttgcctggtcatttagcaagtatgcttccattttttcaaaggtaatgggttatatcttgaatcaaacttaaactgcattgacatatggacacatttgttcaaaggttcttgtttaacttgtgtgaaatccaagactgtcttgtaaacatggaaagagttcaacttttaaaaaaaaatttagatacataaaactgtttaaagttatatgattcataagagtttatctaatacccccagaaatttctactcacatttatcacatagcttggtcatttacatactatggaactcataatattatttaacttaggggagcacgtgaggttcgtggcacgagatggaatgctatcagcagagtagacatgtttttccagggtcttgttttttgtttttgtttctggtctcttcctgtttgggcggagggtaatataatagataatatacataatagaatacactctgatacctgacttagccgtgttttgacaacttggaaacttgattcaattatttataacacagctgaaaatttaaaatggactccacacatttaaatgcagtttcaggccaattttctaggtacaattaccacagacaggtgagctacagcataaattccaaacatggcagaaatggaaattacctataaatataaatgagtttagatattgatgagcctgatgctatttcccgggcactccactgttcccctcaccttaaggaactctcaagtcctgctcttccactgcaagcacagctggtccttaaatctacaggcctctggctacagtccgaatttgaacacagttctgtcaccgtgtgcagcagcagcagccatgtgcaaagttctagatcaaggaacaaaggtagcacatgttcctgacagtgtggaaacataaacataaatgcgaattaaatagaaattatcccttctgaattctttttgttcctttcatttctaaataggttgttcctggagcctgaattaataaaaagaacacagcacacatttttcaggcgatgagggtttcacatggtgataatgtgaatacattcagtttttatttgattctcataggtcaagttttactgttcggtaagagttgtaaattagattaaaaccctgatgcataagttgtaaacaaacttaatttaagagcaagtttgaaaagcacaagagctaataacaccactgaggcatatagacaagtctcttatgggcatatgcagctccctgaagcgcatggatcaagctaccgcctcagagcacaccagcaccaggggcgcatgctaaaggaagagctcccctccccaccccccatgcttcacgatccatgttgacttcagtctgtgccattctgggcatcatagttctccttcagattattagcagttccacctcttggcacgtactacttttgctctaagttggagtgagagtactggtttataagattactggatttgtacaatatttaagattcaataaattctaagtg

SEQ ID NO: 849 - DNA, 2042 bp, Rattus norvegicus
  Genbank Accession No. NM_012792
gaacataaagtcagattgctaaacttctgtgtcgactgaaaaacatggtgaagcgagttgcaattgtgggagctggggtcagtggcctggcctccatcaagtgctgcctggaagaaggactagaacccacctgcttcgagagaagctgtgacttgggaggactttggagattcacggaacatgttgaagaaggaagagccagcctttacaactcagtggtttctaacagcagcaaggagatgtcttgttactccgatttcccttttccagaagactacccaaactttgtgccaaattctctgttcctggaatatctccagctgtatgcaacccagttcaaccttctgagatgcatctatttcaacaccaaagtgtgcagtataacaaaacgcccagatttcgctgtctctggacaatgggaagtggtcactgtctgtcaagggaagcaaagctcagacacctttgctgctgtcatggtctgcactgggtttctaactaacccacatctgcccctggattcctttccaggcatacaaacttttaaggggcagtacttccacagccggcagtataaacatccagacgtatttaaggacaagcgagtccttgtggttggaatgggaaattctggtacagacattgccgtggaggccagtcacttagcgaaaaaggtgtttctcagcaccaccggaggggcatgggtgatcagccgagtctttgattcagggtacccctgggacatgatattcatgacgcgatttcagaacatgctcagaaatcttctcccaactccagttgtgagttggttgatatcaaagaagatgaacagctggttcaaccacgtgaattacggtgtggctccagaagacaggactcagctgagagagcctgtgctgaatgatgagctcccaggccgcatcatcactgggaaagtgttgatcaagcccagcatcaaggaggtgaaagaaaactctgtcgtctttaacaatacaccgaaggaggagcctattgacgtcatcgtctttgccactggatactcctttgcgttccccttcctcgatgaatcaatagtgaaagttgaggatggccaggcatcactgtacaagtacatcttcccggcacatctgccaaaaccaactctggccgtgattggcctcatcaaacccctgggttccatgatacccacaggagagacacaagctcgatgggttgttcaggtcctgaaaggtgcgactacattaccacccccgagtgtcatgatgaaagaagtcaatgaacggaagaagaacaagcatagcggatttggcttgtgctactgcaaggctttgcaatccgattacataacgtacatagatgacctcctgacctcgatcaacgcaaaaccggacctgcgggccatgctcctgactgacccacgcctggctctgagcatcttcttcggcccatgcacaccttaccatttccgcctgactggtccaggaaagtgggaaggagccagaaaggccatcttgacccagtgggaccgaacagtgaacgtcaccaaaactcgaaccgtacaagaaaccccatctacctttgaaactttgcttaaactctttagttttctggctttgcttgtggctgttttctttattttcctgtaagtgaaagatctaactggctttccaaatgtgtggagtataaccttccaacttctctaatgtaacaatttcaccttcgtaattgtaaaccacgtccagagacacccaacccctacctctccccaactcacctcattggcaccttcattgctgggtctcttgctagtccatcaggtttagtgcaagaaaataatgtccagcaattctgttcacttaaaatgttggaaggatccaggccccctttcaggaagaatctgcccccagagaggactctgagcattctttcaatctaaaaaactgctttccctagatcttaatgaaaagcccaacttcgcggaatattggtctgcactaaaatagttctctgtgtattagttgactacaaataaaatggaagaaact

SEQ ID NO: 850 - DNA, 924 bp, Rattus norvegicus
  Genbank Accession No. NM_012793
cctggtggttccgcagccgtactctcctggcctggtgtgcacagcctcaccatgagttcttctgcagccagcccgcttttcgcgcctggcgaggactgcggccccgcgtggcgcgcggcccccgcggcctatgatacgtctgacacgcacctgcagatcctgggcaagccagtaatggagcgttgggagaccccctacatgcattcgctggcggctgctgctgcctccagagggggccgggtcctggaagtgggctttgggatggccattgcagcctccagggtgcagcaggcccccataaaggaacactggattattgaatgcaacgatggggtcttccagcgtctacaaaactgggccctgaagcagccacataaggttgttcccttgaaaggcctgtgggaggaggaggcacctacactgcctgatggtcactttgatgggattctatacgacacatatccactgtctgaagagacctggcacactcaccagttcaactttattaagactcatgctttccgtttgctgaagcctgggggtatcctcacttactgcaacctcacgtcctggggggaactcatgaagtccaagtacacagacatcactgccatgtttgaggagactcaggtgcctgcactgctggaagctggcttccagagagaaaacatctgtacagaggtgatggcgctggtgcccccagccgactgccgctactatgccttccctcagatgatcacacccctggtcaccaagcactgagcggctggcccagggctacaaggagaatatgtcctcctcagtgcctttgtagctggagtgtggctccagcctctccactatccctgcagtgtgacatcctaacctctgcctggtacggccatctccccagagctcaggagtaaaataaatgctaccaagact

SEQ ID NO: 851 - DNA, 1543 bp, Rattus norvegicus
  Genbank Accession No. NM_012803
cgaaattgcagtttctccttggcccacccctgtgtcagcagctccaggatgtggcagttcagaatcttcctgctgttcgcgtccacctgggggatttctggcgtatcagcccatcccgacccagtgttctccagcagcgagggtgcccaccaggtgcttcgggtcagacgagccaacagcttcctggaggaggtgcgggcaggcagcctggagcgggagtgtatggaggagatctgtgacttcgaggaggcccaggagattttccagaatgtggaagacacactggccttttggatcaagtacttcgatggtgaccagtgctcaactccgcccttggaccaccaatgcgacagcccatgctgcggccatggcacatgcatcgacggcctgggcggcttcagctgcagctgcgataagggctgggagggcaggttctgtcagcaggagatgggcttccaggactgtcgggtgaaaaatggcggctgctaccactactgcctggaggagaccagagggcggcgctgccgttgcgccccgggctatgagctggcagatgaccacatgcactgcaggcccaccgtgaattttccgtgtgggaaactgtggaagcggactgacaagaaacgcaagaacttcaaacgggacatagacccagaagacgaagaactagaactaggtccaaggatagtcaatggaacactaacaaagcagggtgacagtccctggcaggcgatccttctggactccaagaagaagctagcctgtggaggggtgctcatccacacctcctgggtgctgacggcagcccactgtctggagagcagcaagaagcttaccgtgaggcttggtgagtatgatctgagacgcagggacccctgggagttggacctggacatcaaggaggtcctcgtccaccctaactacacccggagcaacagcgacaacgacatcgccctgctccgcctgtcccagccagccacactctctaaaaccatagtgcccatctgtctgccgaacagcggcctggcgcaggagctcagtcaggctggccaggagacggtggtgacaggctggggctatcaaagcgacaaagtcaaggatggcagaaggaaccgcacctttattctcaccttcatccgcatccctttggccgctcgaaatgactgcatgcaggtcatgaacaacgtggtctcggagaacatgctctgcgccggcatcattggagacacgagagacgcctgcgacggcgacagtgggggacctatggtggtcttctttcggggtacctggtttctggtgggcctggtgagctggggtgagggctgtgggcacctcaacaactatggcgtctacaccaaagtgggtagctacctcaaatggatccacagctacataggggaaagggatgtttccctgaagagcccgaagctgtagcatccctccctgctcatctctggggcccagaggtcactcttagaataaggctgggctagtgagtaccaagacaggggacattaaaggggcaagcaacacctgaaaaaaa

SEQ ID NO: 852 - DNA, 1504 bp, Rattus norvegicus
  Genbank Accession No. NM_012816
gctgcgtggcgtcagggttctggagctggcaggcctggccccagggccgttctgcgggatgatcctggcggacttcggcgccgaggtggtgctcgtggacagactgggctccgtgaaccaccccagtcacctggcccgaggcaagcgctcgctggcgctggacctgaagcggtctccgggagccgcggtgttgcggcgcatgtgcgcacgcgcggacgtgttgctggagcccttccgttgcggtgtcatggagaaactccagcttgggccagagactctacggcaggacaatccaaagctcatctatgccaggctgagtggatttggccagtcgggaattttctccaaagtagctggccatgacatcaactatgtggctttgtcaggtgtcctgtcaaagattggcaggagcggtgagaacccataccctcccctgaacctcctggccgactttggtggcggtggcctcatgtgcacattgggcattttgctggctctcttcgaacgcacgcggtctggcctagggcaggtcattgatgcgaacatggtggaaggaacggcatacttaagtactttcctgtggaaaactcaggccatgggtctgtgggcacagcctcgagggcaaaacctgttagatggcggggcacctttctacacaacctacaagaccgcagatggggagttcatggctgtaggtgcaatagaaccccagttctacacactgctgcttaaaggacttggacttgagtctgaggaactccccagccagatgagcatagaagattggccagaaatgaagaagaaatttgcagatgtgtttgcaaggaagactaaggcagagtggtgccagatctttgacgggacagatgcatgtgtgaccccagtgctgactcttgaggaggccctccaccaccagcacaacagagaacggggctccttcatcactgatgaggagcagcatgcatgcccccgtcctgcaccccagctttccagaacccctgctgttccttctgccaaaagggacccttctgtgggagagcacactgtagaggtgcttaaagactatggattcagtcaggaagagatccatcagctgcactcggatagaatcattgaaagtaataagctaaaagccaacctctgactcaggttcacagctcaagtgaatctgaaggctgtatctgtactggagaaggatgcccaccactgtccgtatggaaatgtgaatgaacagtaatgaagtaatccaaatattccaatcaagacacaacgaaagactgattacagagaaatgactgtgctctcacactgctcatccgagcctctgattgaggagtatttttgtgtgtgtactgatattaacttgtggcagttttctgcctttcagcttacttggtgaagtgcattcactgattaaaacccttttgtaaatgcaactctgataatatattaaatgaactaatataactttaataaataaagcttttttttccttgaaaaaaaa

SEQ ID NO: 853 - DNA, 1630 bp, Rattus norvegicus
  Genbank Accession No. NM_012817
cttttttttcctctcccttgatttcaacattttcccgatcttcttggcgccgccgacgcctcttacctgttctgcgcagcgcgcgagctggcagctgagagaagtgggggtgcgttttaggttttaagcaaaggcaaaaaaaaaaattaagccaaatccattttttttccttcacctctccccgtttcaaggcctccaagatcattatttctgtagctttggggtgagcgattctgtgtttctcttcatcacccctccaattctgccccgatcccgcctgggtctccactcactgcgtgcacctggcgcgcctcttttttttttcacccccaacctgttgcaagtctttaatccttgcaattgggacttgcgtgcaggcacctgaatcctccttgcctcatattttgcaagtgtttggaggacagcacctgctttacctgcaagagatattttttaaaaaaaaaaaaatctccaggctccctcttggcccctttctccacacactctcgctctcctgccccgccccgaggtaaagccagactcggaaaaaatggtgatcagcgtggtcctcctgctgctggccgcctgtgccgtgccggctcaaggcctgggctctttcgtgcattgtgaaccctgcgacgagaaagctctgtccatgtgtccccccagccctctgggctgtgagctggtcaaagagcccggctgtggctgctgcatgacttgcgccctggcggagggacagtcgtgtggcgtctacactgagcgctgcgcccagggtttgcgctgtctcccccggcaggatgaggagaagccgctgcacgccctgctgcacggccgcggggtttgcctcaacgaaaagagctacggcgagcaaaccaagatagagagagactctcgggagcatgaggaacccaccacctccgagatggctgaggagacctactccccgaaggtcttccggcccaagcacactcgcatttccgagctgaaggccgaggctgtgaagaaggatcgcagaaagaagctgacccagtctaagtttgtggggggcgcggagaacactgcccacccccgagtcatccctgcacctgagatgagacaggaatctgaccaaggcccctgccgcagacacatggaagcttccctccaggagttcaaagccagcccacgcatggtgccccgtgccgtgtacctgcccaactgtgaccgcaaaggattctacaagagaaagcagtgcaagccttctcgtggccgcaaacgtggcatctgctggtgtgtggacaagtatgggatgaagctgccgggcatggagtacgtcgatggggactttcagtgccacgccttcgacagcagtaacgttgagtgacgcgtcccctcccttcctccccctttcctaccccccagccccaactccagccagcgcctccctccaccccaggacgtcactcatttcatctcatttaggggaaatatatatacatatatatttgaggaaactgaggacctcggaatctctagcaagggctaaggagacactccccattcccgaccccggaaacgtattcctatttgaagcaagttgaacggacagagaagggaagaagagaaggggcaagaaggagcgaggaat

SEQ ID NO: 854 - DNA, 1758 bp, Rattus norvegicus
  Genbank Accession No. NM_012827
gagagggtggtgctggagggtgggaaggcggcacgagcgaggcctggcccggaagctaggtgagttcggcatccgagctgagggaccctagtctaagactccgctgctacccagtctgagtatctggtctccgtccctaatgggattctcgtccaaaccgtctggagcctgcagcgatccagtctctggccctcgaccaggttcactgcagctgtctagaggtccccaggagcagctgctggcgagcccgcttctgcaggaacctatggagccattccgtagtgccattccgagcgacgcactgccgcagcttctctgagcctttccagcaagtttgttcaagattggctcccaagaatcatggactgttattatatgccttgttttctgtcaagacaccatgattcctggtaaccgaatgctgatggtcgttttattatgccaagtcctgctaggaggcgcgacagatgctagtttgatacctgagaccgggaagaaaaaagtcgccgagattcagggccacgcgggaggacgccgctcagggcagagccatgagctcctgcgggacttcgaggcgacacttctgcagatgtttgggctgcgccgccgtccgcagccgagcaagagcgccgtcatcccggattacatgagggatctttaccggctccagtctggggaggaggaggaagaagagcagagccagggaaccgggcttgagtaccctgagcgtcctgccagcagagccaacactgtgaggagtttccatcacgaagaacatctggagaacatcccagggaccagtgagagctctgcttttcgtttcttctttaacctcagcagcatcccagagaatgaggtgatctcctctgcagagctccggctatttcgggagcaggtggaccagggccctgactgggaacagggcttccaccgtataaacatttatgaggttatgaagcccccagcagaaatggtgcctggacacctcatcacacgactactggacaccagactagtccgtcacaatgtgacacggtgggaaactttcgatgtgagccctgcagtccttcgatggacccgggaaaagcaacccaactatgggctggccattgaggtgactcacctccaccagacacggacccaccagggccaacatgtcaggattagccgatcgttacctcaagggagtggaaattgggcccaactccggcccctcctggtcacttttggccacgatggccggggtcataccttgacccgccggagggccaagcgtagtcccaagcatcacccacagcgctccaggaagaagaataagaactgccgtcgccattcgctctacgtggacttcagtgacgtgggctggaatgattggatcgtggccccaccaggctaccaggccttctactgccacggggactgtccctttccactggcggaccacctcaactcaaccaatcatgccattgtgcagaccctggtcaactccgttaattctagcatccctaaggcctgctgtgtccccaccgaactgagcgccatttccatgttgtatctggacgagtacgacaaggtggtgttgaaaaattatcaggagatggtggtggaggggtgcggatgccgctgaaatcaggcagtccggaggacggatgcacacacacacacacacacaaagcccatccgaccacccacacataccacacaaagtgcttccctatagctggacttttacttaaaaaaaaaaaaaaaaaactcgag

SEQ ID NO: 855 - DNA, 4377 bp, Rattus norvegicus
  Genbank Accession No. NM_012836
tgcggagccgctggagcggagcggtgttagcggcgttgctggaagatggcgagcggctgggatgagcggccgccctggcggctggaaagcctgcggctgctaccgccgccaccgctgctgctgctactgctgctattgaggagctcggcccaggcggcgcacatcaagaaggctgaggcgaccacgacgaccgtcggcggctccgaggcggccgagggccagtttgaccactactaccacgaagcggcgctgggcgaggcactggaggcggcagcggccgcggggccgcctggcctggcccgtctcttcagcatcggcaattcggtggagggccgaccgctgtgggtgctgcgcctcacggctggcctggggccgccgcccacccccgccgccgtggggctggacgccgcggggccgctgctgcccggccgaccgcaggtgaagctggtgggtaacatgcacggcgacgagacggtgtcgcgccaggtgttggtctacctggcccgtgagctggcgtcgggctaccgccgcggggacccgcgcctggtccgcctgctcaacaccaccgacgtatatttgctgcccagcctgaatccggatggcttcgaacgcgctcgcgagggtgactgcggcctcggcgacagcggtccgcctgggaccagcggccgagacaacagccgaggccgcgacctcaaccgcagcttccctgaccagttcagcacgggggagccaccttccctggatgaggtgccagaggtgcgcgccctcatcgactggatccgcaggaacaagtttgtgctttctggaaatcttcatggtggctcagtggtagcaagctatccttttgatgattctcccgagcataagaccactggaatctatagcaaaacctccgatgatgaagtctttcgatacttggcgaaagcttatgcttctaaccaccctataatgagaactggtgaaccccattgtccaggagatgaagaggagactttcaaagacgggatcacgaacggtgcgcactggtatgatgtggaaggtggtatgcaagattacaactatgtgtgggccaactgttttgagatcacattagaattatcttgctgcaaatacccacctgcttctcagcttcgacaagaatgggagaacaaccgtgagtctttgatcacattgattgaaaaggtccacattggaattaaaggatttgttaaagactcagtcacaggctctgggttggagaatgcaaccatctcagtggctggtattaatcataatatcacaactgggagattcggtgatttccacagactgctcattcctggaagttacaatcttacagcggtttcacctgggtatatgccgttgactattaataatatagtggtgaaagaaggaccagccacagagatagatttctcccttcaaccaactgtgatgtcagtagtgcctgactcgactgaggctgtgacaactcccggcacagttgccgttcctaatattcctcctggaacaccatcgtcccatcagccaattcagcctaaagactttcaccaccaccattttcctgacatggaaatcttcttgagaagatttgccaatgaatatcctaacatcactcgcctttattctctgggaaagtccgtagagtcgagagaactgtatgtgatggagatatctgacaacccaggcgtccatgaaccaggtgaaccagaatttaaatatattggaaatatgcatggaaatgaagtggttggaagagaactgctattgaatctcatcgaatacctctgcaagaactttggaacagaccctgaagtaacagatttggttcgcagcactagaattcacctcatgccatccatgaatcctgatgggtatgagaagtcccaagaaggagactcgataagtgtagttggcagaaacaacagcaacaactttgacctaaaccgaaatttcccagaccagtttgttccgatcacagatcctacccaacctgaaactatcgctgtgatgagctgggtgaaggcctatccgtttgtgctgtcggccaatctgcatggaggttccttggtggttaactacccttatgatgataatgaacaaggagttgccacatacagcaaatcaccagatgacgccgtgtttcaacaaatagcactttcttattccaaggaaaactcgcagatgttccaaggtagaccttgcaaagacatgtaccttaatgagtattttcctcatggcataacgaatggagcgagttggtataatgtcccaggtggtatgcaggactggaactatttacagacgaattgctttgaagtaaccatcgaactaggttgtgtgaaatatccattcgagaaggaactgccaaagtactgggagcaaaaccggagatctctaatccagtttatgaaacaggttcatcagggtgtcaaaggatttgttcttgatgccacagatggtaggggcatattaaatgccaccctcagtgttgctgaaattaatcacccagtgacgacttacaaagctggagattactggcgtctcttggtcccagggacatataaaatcacagcatctgctcgagggtataaccccgtcaccaagaacgtgaccgtcaggagtgaaggtgctattcaggtcaacttcacacttgttcgatcttcaacagatgcaaacaatgagtcaaagaaaggaaaggggcatagcaccagcactgatgacaccagcgacccaacttctaaggagtttgaagcactgatcaaacacctttcggctgagaatggcttggaaggcttcatgttaagctcgtcctcagacctggctctgtatcgataccattcctacaaagacttatccgagttcctgagaggactcgtaatgaactacccacacattacaaaccttaccactttgggacagagtgttgaatatcgtcacatttggtcccttgaaatctccaataagcccaacatatcagaacctgaagaaccgaagattcgttttgttgctggtatccatggaaacgctccagttggcactgaactgcttttggctctggcagaatttctttgcctgaattacaaaaagaatccagttgttacccaattggttgacaggactagaattgtgattgtcccctctctgaatccagatgggagagagcgagcacaggagaaagactgtacctcgaagactgggcacacaaatgcccgtggcagggacctggacacagacttcacaagtaatgcttcccaacctgagaccaaagccatcattgaaaacttgattcaaaaacaggatttcagcctttccattgctttagatggtggttctgtgctggtcacatatccgtacgacaagccagtccagacagtggaaaacaaagaaacgttaaagcatctggcgtctctttatgcaaataaccacccatcaatgcacatgggtcagcccagttgcccaaataattcagatgagaacataccaggaggagtgatgcggggagcagagtggcacagtcacctgggcagcatgaaggattatagtgtcacctatggccattgcccagaaatcacagtatacacaagctgctgctacttcccaagtgcagctcaactccctgccctatgggcagagaacaagaagtctctcctcagcatgctggtggaggtccacaaaggagtccatgggttagtaaaagacaagactggtaaaccaatctctaaagcagtaattgtactcaatgaaggaataagagtacacacaaaagaggggggttatttccatgtgcttttagctcctggggtccataacatcaatgccatcgctgatggatatcagcaacagcattcacaggtctttgtgcatcatgatgcagccagttctgtggtgatagtctttgatacagataaccggatatttggtttgccaagggaacttgtggtaactgtgtcaggtgccaccatgtcagcgctgatcctcacggcttgcatcatttggtgcatctgctctatcaagtctaacagacacaaagatggcttccaccggctgcggcagcatcatgatgaatatgaagatgaaattcgcatgatgtcaactggctctaagaagtcccttttaagccatgagttccaggatgaaacggacacagaggaagagacattatattctagcaaacattgagaagcacggtttgcatatctccctgcttaagtaccaggcaaatgacagctcctcttgggagacactgcagtaagaagagagattccttcctccttcaaagagctttgggaagttagcctgctaaattcatactctctgaatgtcacaggcagttttgaacttcccttccttaaaagtactcttaaccttttcctt

SEQ ID NO: 856 - DNA, 318 bp, Rattus norvegicus
  Genbank Accession No. NM_012839
atgggtgatgttgaaaaaggcaagaagatttttgttcaaaagtgtgcccagtgccacactgtggaaaaaggaggcaagcataagactggaccaaacctccatggtctgtttgggcggaagacaggccaggctgctggattctcttacacagatgccaacaagaacaaaggtatcacctggggagaggataccctgatggagtatttggaaaatcccaaaaagtacatccctggaacaaaaatgatcttcgctggaattaagaagaagggagaaagggcagacctaatagcttatcttaaaaaggctactaatgaataa

SEQ ID NO: 857 - DNA, 4801 bp, Rattus norvegicus
  Genbank Accession No. NM_012842
caaaaggagaagccatcagggaaggaatcctatctgcatatttcgtctttagccccatccctcattcccggtggggtttggaactttccatcaattctttccctgtctcatttctctttgagcctttgcctagctgtgcctgtcacagcgagaaatcagtcaccctccgccttccagcactcttaggctctgagaaatttggcatacgggtgtcaggtattaaaacagctaaataaaagatgccctggggctgaaggccagcgtggctggaagttctgggggtcagaagcctgactccgcctgctccaagctctagcaatttaagtcacccgggggttttttgttttggtttggtttggtttttcttgaccttagaaccaccgagaccatgctgttctcgctcaccttcctgtcggtgtttttaaagattactgtactcagtgtcacagcacagcagaccaggaactgtcagtcaggtcctctcgagagaagcgggactaccacgtatgccgccgccggtcctcccaggttcctgattttcttacaaggaaacagcatctttcggattaacacagatggaacaaatcaccagcaattggtggtggatgccggcgtctcagtggtcatggattttcattacaaggaagagagactctattgggtggatttagaaagacaacttttgcaaagagttttctttaatgggtcaggacaagagacagtgtgcaaggtggataagaatgtgtctgggctggccataaactggatagatggggagattctccggacggaccgatggaagggagtcatcacagtaacagatatgaacgggaacaattcccgtgttcttctgagttccttaaaacgtcctgcaaatatattagtggatccaacagagaggttgatattttggtcttcagtggtgactggcaaccttcacagagcagatctcgggggtatggatgtaaaaacactgctggaggcaccagagaggatatcagtgctgattctggatatcctggacaaaaggctcttctgggctcaggacggtagagaaggaagccacggttacattcactcctgtgactataacggtggctccatccatcatatcagacatcaagcacggcacgatttgcttactatggccattttcggtgacaagatcttatactcagcactgaaagagaaggcgatttggatagccgacaaacacactgggaagaatgtggttcgagttaacctcgatccagcctctgtgccgccaagagaactgagagtcgtgcacctacatgcacagcccgggacagagaaccgtgctcaggcctctgactccgaacgatgcaaacagagaagaggacagtgtctctacagtctctctgagcgagaccccaactcagactcgtcggcatgcgctgaaggctatacgttaagccgagaccggaagtactgcgaagatgtcaatgagtgtgccttgcagaatcacggctgtactcttgggtgtgaaaacatccctggatcctattactgcacatgccctacaggctttgttctgcttcctgatgggaaacgatgtcacgaacttgttgcctgtccaggcaacagatcagagtgtagccatgattgcatcctgacatcagatggtcctctgtgcatctgtccagcaggttcagtgctcggaaaagatgggaagacatgcactggttgttccttctccgataatggtggatgcagccagatctgccttcctctcagcctagcatcctgggaatgtgattgctttcctgggtacgacctacaattggaccgaaagagctgtgcagcttccatgggaccgcagccatttttactgtttgcaaattcccaggacatacgacacatgcattttgatggaacagactacaaaactctgctcagccggcagatgggaatggtttttgccttggattatgaccccgtggaaagcaagatatattttgcacagacagccctgaagtggatagagagggctaatctggatggctcccagcgagaaagacggatcacggaaggagtagacacgccagaaggtcttgccgtggactggattggccggagaatctactggacggacagtgggaagtctgtcattgaagggagtgatttgagcgggaagcatcatcaaataatcatcaaagagagcatctcaaggccacgaggaatagctgtgcatccaaaggccaggagactattctggacggacacggggatgtctccgcggattgaaagctcttcccttcaaggttctgaccggacgctgatagccagctctaatctactggaacccagtggaatcgcgattgactacttaacagacactttgtactggtgtgacaccaagctgtctgtgattgaaatggccgatctagatggttccaaacgccgcagacttacccagaacgatgtaggtcacccattctctctagctgtgtttgaggatcacgtgtggttctcggattgggctatcccatcggtaataagggtgaacaagaggactggtcaaaacagggtacgtctccgaggcagcatgctgaagccctcgtcactggttgtggtccacccattggcaaaaccaggtgcagacccctgcttacacaggaatggaggctgtgaacacatctgccaagagagcctgggcacggctcagtgtctgtgtcgggaaggattcgtgaaggccccagatgggaaaatgtgtctcactcggaaggatgatcagatactggccggtgacaatgctgatcttagtaaagaggtggcatcgttggacaactcccctaaggcttatgtaccagacgatgataggacagagtcctccacactagtggctgagatcatggtgtcagggctgaactatgaagatgactgcggccctggtgggtgtggcagccatgcccactgtatttcagagggagaggcagctgtgtgtcagtgtttgaaaggatttgctggcgatggaaacctgtgttctgatatagacgaatgtgagctgggtagctcagactgtcctcccacctcgtccaggtgcatcaacaccgaaggtggctatgtctgccaatgctcagaaggctacgagggagatgggatctactgtctcgacgttgatgagtgccagcaggggtcgcacggctgcagcgagaatgccacctgcaccaacacggagggaggctacaactgcacctgtgcaggctgcccatcagcacctggactgccttgccctgactctacctcaccctctctccttggaaaagatggctgccactgggtccgaaacagtaacacaggatgcccgccgtcgtacgatgggtactgcctcaatggtggcgtgtgcatgtatgttgaatccgtggaccgctacgtgtgcaactgtgtcattggctatattggagaacgatgtcagcaccgagacttacgttggtggaagctgcgccatgctgactacgggcagaggcacgacatcactgtggtgtctgtctgtgtggtggcgctggccctgctgctcctcttagggatgtgggggacttactactacaggactcggaagcagctatcagagagctcaaagaagccttccgaagagtcaagcagcaacgtgagcagtaacgggcctgacagcagcggggctggggtgtcttctggtccccaaccttggtttgtggtcctagaggaacaccaacagcccaagaatgggcgtctgcctgccgctggcacgaacggcgcagtagtagaggctggcctgtcttcctccctgtaactcgggccagtgcacctgacttcctggagacagaagccccgaatatatgagatgggcacagagcaaagctgctggattccaccatcaaatgacaaaggaccccaggaaatggaggggaacccccacttaccctcctacagggaatggcctctagctgtgtgggctgagaagaagctgcattctctccagtcagctaatggatcgagtcaacaaagggcctcagacctgccccagcaaacagagccagttctgtagaaactgggagcagacagaaggtaccgaaagtgaaatagcaaaccaggctgaagggtggtagagcggcagatctggtactcctgtctccacggctaatcactgctcagggtcctgaagataactgcatagctgcatagctgatagccgcgacttctgcttcttgcttcaagcagtcccgttgaagacgatcaaaagagaagtggagaaaaatcatcagaaaccgaagtcaagacggttcacgtgtgtaagctgtgtccttcctacccctggactgttgggctcttttccttgttgtctcagaagaaatgggttaaagcaggcgatcacatgctttgttgattgcacagtagatgatatgatctacatagatcttagctcactctcacggaaaggctggaacattatagatgctgcaagatacactgcaagtgtggcccctgctcataattttgccttctgaattgtgattagtgaaaataattgtaacttagagtccgatttattcagaatcagagcattatttttatactatgaaaatctttgaatgaagatatttaactttaaaaacatttcctaagagacaacagtgtttcttaatcattgtcttttcttcttgcagtctttcccagtgaaaacggtaaattctgctgtttgcatagaatctttaacttatttttaagatatgagattgtaaacaaattgcttgatttatttcaatcaatttattctaattatttaaataaaatcacccctaag

SEQ ID NO: 858 - DNA, 1242 bp, Rattus norvegicus
  Genbank Accession No. NM_012844
atgtggctggaacttgtcctggcttcccttctgggctttgtcatctactggtttgtctcccgggacaaggaggaaaccttaccactaggagatggatggtgggggccagggtcaaagccatcagccaaagaagatgagagcatccggcccttcaaggtggaaacatcagatgaggagatcaaggacttacaccagaggatagataggttccgggcatccccacctttggagggcagccgcttccactatggcttcaactccaactacatgaagaaagtggtgtcctactggaggaacgagtttgactggaggaagcaggtggagatcctcaaccagtaccctcacttcaagaccaagatcgaagggcttgacatccacttcatccatgtgaagcctccccagctgccctcagggcgcaccccaaagcccttgctgatggtgcatggctggcctggatccttctatgagttttacaagatcatcccactactgactgaccccaagtcccacggtctgagtgacgagcacgtgtttgaagtcatctgtccctcgattcctggctatggctactcagaggcatccagcaagaaaggtttaaattcggtggccactgcgaggattttctacaagctgatgacacggctgggcttccagaaattctacattcaaggcggggactgggggtccctcatctgcaccaacatggcccagatggttcccaaccacgtgaaaggcctgcacttaaatatggctttcatttcgagaagtttttacaccatgactcctctcctgggccaacgcttcgggagattccttggctacacagagaaggatatcgagctcttgtacccctataaggagaaggttttctacagcatcatgagggagagtggctacttacacatccaagccaccaagccagacactgtgggctgtgctctcaatgactctcccgtgggcctggctgcctacatcttagagaagttctccacctggaccaagtcagagtaccgtgaactggaggatggaggcctggagaggatgaaggtctttgtgcccactggcttttcagccttcccttccgagctactgcatgccccagaaaagtgggtgaaggtcaagtaccccaaactcatctcctattcctacatggaacgtgggggccactttgctgcctttgaagagcccaagcttctggcccaggacatccgcaagttcgtgtccctggctgagctgcagtag

SEQ ID NO: 859 - DNA, 3704 bp, Rattus norvegicus
  Genbank Accession No. NM_012859
tagccctaacccctctcccaaagtaagaggcacagagtgatcacttggcgaggagtggggaccagcagtgaaaaacccgcggaccagctctaaagaaagaccaggaatgccaggacaaaagattagagcccaaagggaggtgccatcatgaaagatctgtgaagaggaagcctgaagggtagggggcagaaggatgaaacctaggagaccaatttctttcacaagggaaataacagctatggagccaagttctacctctgtgtctaggccagaatggagacctgaggcacagcagaccctcacagactacccaggatcaagggaactgcaggaatttggtatcccacagaaacaaagtctcccaaatgaggccactgcccagcaaggagctgaattccagcaagaacagggagttcaacaatctactctgctccagaaacttctcaccccattagccttccctgtaccacagcaatcattcccaagccacaaagtgcactcggatcaacaggaagccacctcccagaatggacctggggcggggaaagtgcatacaactcaaaaggaactagaacacagagatgaacacgtggggacagcagaatctggaccagcagaaccacctccagctacagaagtagaggctacatctatagcccaggccgtatctggaccggacaagaaactccctacccaaactgacttggtctcccaagagagagctgagcagtcagaccctacagcccagcaaacacctctagtccaaggagtcaagtctgaccagggatctttgatagagtcagggattttagcaagactgcagaaactagccatacagcagccctcccaagagtggaagacatttcttgattgtgttacagagtctgacatggagaaatacctgaattcatcctcaaagtcaaaccctccagagccaagtggtgggacagtgatcccaggaacgctgccctccaaacagaaacccgattgtggaaagatgtcaggatatggtgggaaattaccacatgggaagaaaggcatcctccagaaacacaagcactactgggatacagcctcggcattctcacacagcatggatttacgcacaatgacacagtcgctggtggcgctcgcagaagacaacatggccttcttctcaagccagggcccaggagagacagcacggcggctgtccaacgtctttgcaggtgttcgggaacaggcactggggctagaaccaactctaggtcagctcttgggtgtggcacaccatttcgacctggacactgagacaccagccaacggataccgtagcttggtgcacacagctcgttgctgcctggcacacctactacacaaatcccgctatgtggcctctaaccgcagaagtatcttcttccgtgccagccacaacctagcagaactggaggcctacctggctgccctcacccagctccgtgctctagcctactacgcccagcgcctgctgaccatcaaccgaccaggagtgctcttctttgagggcgatgagggactcagcgctgacttcctacaggactatgtcacgctacataaaggctgcttttacggtcgctgcctgggcttccagttcacacctgccatccggccgttcctgcagactctctccatcgggctggtgtccttcggggaacactacaaacgcaacgagacgggcctcagtgtgactgcaagttccctctttacgggtggccgattcgccatagacccagagttgcgtggggctgaatttgagcgcatcatacagaacctggacgtgcacttctggaaagccttctggaatatcacggagatcgaggtgctatcgtctctggccaacatggcatcaaccaccgtgagggtaagccgcctgcttagcttgccgcctgaggcctttgagatgccactaacctctgaccccaagctcacagttaccatctcacctcccttggcacacacgggaccaggccctgtgctagccaggctcatctcctatgacctgcgggaagggcaggacagcaagatgctcaacagcctggcaaaatctgagggcccacgcctggagctgcgcccacggcctcaacaagccccccgctcacgagccctggttgtccacattcacggtggtggctttgtggcacagacctccaaatcccatgagccctacctcaagaactgggcccaggagctaggcgtccccatcatctccatcgactactccctggcccctgaggcccccttcccccgagcactggaggagtgtttttttgcctactgctgggctgtcaagcactgtgaactgcttggttcaaccggagagcggatatgccttgcgggggacagcgcaggtgggaacctctgcatcaccgtgtcccttcgggcagcagcctatggggtgagggtgccagatggcatcatggcagcctacccagttaccaccctgcagtcctctgcttctccctctcgtctgctgagcctcatggatcctcttctaccactgagcgtactctccaagtgtgtgagcgcctattcagggacagagacggaggaccattttgactcagaccagaaggcattgggcgtgatggggctggtgcagagagacacgtccctgttcctcagagacctccgcctgggcgcctcctcatggctcaactccttcctggagttaagtgggcgcaagccccataagaccccattgcctgcaacagagacactgcgccccacggattctgggcgccttacggagtctatgcgcaggagtgtgtctgaggcagccctggcccagcctgagggcttgctgggcacagattccttgaagaagctaacaataaaggacttgagctttaagggcaactcagagccatcagacagccccgagatgtcacagtcaatggagacacttggcccctccacaccctcggatgtcaacttttttctgcgatccgggaattcccaggaagaggctgaaaccagagatgatataagccccatggacggaatcccccgcgtgcgcgctgccttccctgatggtttccacccacggcgctcaagccaaggtgtcctccacatgcccctctactcgtcacccatagtcaagaaccccttcatgtctcctctgctggcccctgacgtcatgctgaagaccctgccgcccgtgcaccttgtggcgtgcgctctggaccccatgctggatgactcggtcatgttcgcgcggcgactgaaggacctgggccagcccgtgacgctgaaagtggtagaggacctgccgcatggtttcctgagcttagcagccctgtgtcgtgagacccggcaggccgcggagttgtgcgtgcagcgcatccggctgatcctcaccccccctgctgcaccgctgacctgagctgggaacggcggggggcggcactaaaagacctcttgcacccttctgcgcgggcttccgtgatgagtgcgctccgagtcgggctctaggccccctcggtcgggctgggcgggagggggcgggccgtgccttaaccataagtggggcggggcaggggccaaaagctgaacctgggggagggggacgcacacacacacacctgtcaccgagacagctggacctgcactctaccactgccttctactgctgctgtgaccgaccaccgctagtcggttttgctttttgtaaataaaagttatttaat

SEQ ID NO: 860 - DNA, 521 bp, Rattus norvegicus
  Genbank Accession No. NM_012862
acacccgagaccatgaagagcctgctccctctggccatcctggctgcgctggccgtggcagccctgtgctatgaatctcacgaaagcatggaatcctatgaagtcagtcccttcaccacccggagaaatgccaacacctttatatcccctcagcagagatggcacgctaaagcccaggaaagagtccgggaactcaacaagcctgcccaggagatcaacagggaggcctgtgatgactacaagctgtgtgagcgctacgccctgatctacgggtacaacgccgcctacaaccgctacttcaggcagcgccgaggagccaaataagagcgcaaggaaacagtcgctttgttacggagtctggtttcatattcccctgcagtagcattaccgatacacagattcgtgttcgttgcttgttcctcacatgatctcctgtcggctgggccactccttccttccgcgggttgaaagtaatgaaagagcagtattaagaaatgtgtttatatataataaaattctgg

SEQ ID NO: 861 - DNA, 1729 bp, Rattus norvegicus
  Genbank Accession No. NM_012880
ggctcacaagcagctggccagttctggggaggcagctcagaggctctttctcaggcctctagctgggtctgtcctgtacttcaccagaggaaaaacgttcttgggagagcttgtcaggtgtggaacctcagccatggtggccttcttgttctgcaacctgctactggtggcctgtggctctgtcacctggaccatgtcagataccggagagtccggtgtcgacttagcagaccggcttgacctggttgagaagataggcgacacgcactccaaagacctggagatctggatggagctaggaaaacaacgggaggcggatgccagggagatgcacgcagtctgcagggtacagccctcagccatgctgcctcccgatcagccacagatcacaggcttggtcctcttccggcagctggggcccagctccagacttgaggcctccttcaatctggagggcttcccagccgagcagaacacctccaaccacgccatccacgtgcatgagttcggggacctgagccagggctgcgagtccaccggaccacactacaacccgctgggtgtgccgcacccacagcacccgggggacttcggcaacttcgtggtgcgcgatggccgcctttggaagcatcgaatgggcctggccacgtcactggccggaccgcactcgatcttgggccgcgctgtggtggtccacgctggcgaggacgacctgggtaaaggtggcaaccaggccagcgtgcagaacggcaacgcaggtcgccggctcgcctgctgcgtggtaggcaccagcaactcggaggcctgggagagccagacaaaggagcgcaagaagcggcggcgggagagcgagtgcaagaccacttaagcatcacccagggccgcctagcctagctgctgcgcgcatagatgcctccacacgcgccctctagacgcctccagtcatcctagaggtctctgggtgtcctagactgacgcttcccagacacctcaatcgcctctgtgcgccccacactcttccacataccccagacacctctgtatggctcagatgccttcaagaacctcctcggccacgtccacgagccccagatgttcccacgtgccctgggcactgttctcggagaccaggacacttttttgtaacctaggaatccttcacacctatgcactccacagaccaactccttcgtgctctaggtccacctcgaactactttatgccccaagacaatcccataagcccctagcatcccctttgaaacagtctttgagtttgctcccagagaattccccgcttacccccagaggtcgaatgtgcgcagataactctccttttactctgaggacatcccagtggaccttctagagaactcccttggggtgttctgaaatatcaccaccccacttccttctgcccccttttgttttctttctgtcccctagcacccgagacttctctcttccctagagacctcgtttgtcttccccttgttcctcctagggctctgggaccaccctgacacacacacacacacacacacacacacacacacacacacacacacacacacatccctaagattccatgttcctgatcacctcctgccgggcccctggttctgttttcatctgtttcccatatggtgcctgcaccccaaggagagcagctcctccgagagtatttgacaacctttatgctgctcattaaaaccacagcaattcaaaaa

SEQ ID NO: 862 - DNA, 1457 bp, Rattus norvegicus
  Genbank Accession No. NM_012881
gcaagcctcagcatccttggctttgcagtctcctgcggcaagcattctcgaggaagccagccaaggaccaactacaaccatgagactggcagtggtttgcctttgcctgttcggccttgcctcctgtctcccggtgaaagtggctgagtttggcagctcagaggagaaggcgcattacagcaaacactcagatgctgtagccacttggctgaagcctgacccatctcagaagcagaatcttctagccccacagaattctgtgtcctctgaagaaacggatgactttaagcaagaaactcttccaagcaactccaatgaaagccatgaccacatggacgatgatgacgacgacgatgacgacggagaccatgcagagagcgaggattctgtgaactcggatgaatctgacgaatctcaccattccgatgaatctgatgagtccttcactgccagcacacaagcagacgttttgactccaatcgcccccacagtcgatgtccctgacggccgaggtgatagcttggcttacggactgaggtcaaagtccaggagtttccctgtttctgatgaacagtatcccgatgccacagatgaggacctcacctcccgcatgaagagccaggagtccgatgaggctatcaaggtcatcccagttgcccagcgtctgagcgtgccctctgatcaggacagcaacgggaagaccagccatgagtcaagtcagctggatgaaccaagcgtggaaacacacagcctggagcagtccaaggagtataagcagagggccagccacgagagcactgagcagtcggatgcgatcgatagtgccgagaagccggatgcaatcgatagtgcagagcggtcggatgctatcgacagtcaggcgagttccaaagccagcctggaacatcagagccacgagtttcacagccatgaggacaagctagtcctagaccctaagagtaaggaagatgataggtatctgaaattccgcatttctcatgaattagagagttcatcttctgaggtcaattaaagaagaggcaaaaccacagttccttactttgctttaaataaaacaaaaagtaaattccaacaagcaggaatactaactgcttgtttctcagttcagtggatacatgtatgtggagaaagaaatagatagtgttttgggccctgagcttagttcgttgtttcatgcagacaccactgtaacctagaagtttcagcatttcgcttctgttctttctgtgcaagaaatgcaaatggccactgcattttaatgattgctattcttttatgaataaaatgtatgtagaggcaggcaaacttacaggaacagcaaaattaaaagagaaactataatagtctgtgtcactataatcttttggttttataattagtgtatattttgttgtgattatttttgttggtgtgaataaatcttgtatcttgaatgt

SEQ ID NO: 863 - DNA, 3508 bp, Rattus norvegicus
  Genbank Accession No. NM_012887
ggcacgaggctcgctgcgggctccaggcttggccgcacttgctcaccagtggtgcgcccggggcttttgtggcttagccggcctgggctttgtgtccgagttctgctccgtgcctgcggcgcttctcccggtcagggattcccgaggcggcgtgcgcagcccccgggaccagcgagcgatcgagcgagcgcgccggcttgagcggtggcgactgcgaggggccgaggaggagagaaggagggggacgagatgccggagttcctagaggacccttcggtcctgaccaaagacaagttgaagagcgagttggtcgccaacaacgtgacgctcccggccggcgagcagcgcaaggacgtgtacgtgcagctctacctgcagcacctcacggcgcgcaaccggccgccgctcgccgcgggagccaacagcaaagggccgcccgacttctcgagcgacgaggagcgcgagcccaccccagtgcttggctccggggcctccgtgggtcgcggccgcggcgccgtcggcaggaaagccacaaagaaaactgataagcccaggccagaagataaagatgatctggatgtgacagagctctctaacgaagaacttctggaacagcttgtgagatatggagtgaatcctggtcccattgtgggaaccaccaggaagctgtatgagaagaagctgttgaagctgagggaacagggagcagaatcgagatcctctactcctctcccaacagtctcttcctctgcagaaaacacgaggcagaatggaagtaatgactctgacagatacagtgacaatgacgaagactctaaaatagagctcaagcttgagaagagagagccgctaaagggcagagcaaagactccagtaacactcaagcaaaggaggattgagcacaatcagagctattctgaagctggagtaactgagactgaatggacaagtggatcttcaaaaggcggacctctgcaggcattaactagggagtccacgagagggtcgagaagaactccaaggagaagggtggaaccctcacagcattttcgtgtagatggtgcagtaatttcagagagtactcccatagctgagactataaaggcttccagcaacgactccttagtggccaataggttgactggaaatttcaagcatgcatcttctattctgccaatcactgaattctcagacataaccagaagaacaccaaagaaaccattgacaagagctgaagtgggagaaaaaacagaggaaagaagagtagaaagggatattctgaaggaaatgttcccgtatgaagcctctactccaaccggaattagtgctagttgccgcagaccaatcaaaggtgctgccggccggccgctcgagctcagtgacttcaggatggaagaatcgttctcatctaagtacgtcccgaagtacgttcccttggcagacgtcaagtcggaaaagacaaagaagggacgctccgttcccatgtggataaaaatgctgctgtttgctctcgtggcgggttttttgtttttggtctatcaagctatggaaaccaaccaaggaaaccccttcactaattttcttcaagatactaaaatatccaactgaagaaatcatttcggcacatccgactcgatctcctgtttttaataactgtagaaaagcatctgtgtccacttgttggccgaagaactaaattgtgatttcacctcagtaaaggtagcgctgcgttggaaagcagacaggaagcttacctggatctcatttcaatgttttggactttggagatcacactgtgccatatgaataatttttttagctccagaacttttttgtaggctttatttttttaatgtggacatcttatttcacttttggggaaaatgcattgttttgtgtatttgaaaaataaggcaaaacatggtgatgtaatgtgaagctacacattaaatacttggaattcttacagaaaagatttatgacttattctctgctgagtaaaaatgttagaaatgtgaatggcgttcagtaagagaagcggtcacgagttgtgcttccttccatatgcagcggtttgtccgtggaaggtccagcaataagctcttctgggactcctgtcgtgcgtgtggtgtcgctggcgcacctgccacactgctcactagaatattttcatatcatgaaagtgctacgtcattaaagccctgagtacacttagttttccactgggatcttggagagcaacatagatacctgcttagggagcctttagctggctgcgcgcgtctaagagaccgagggctagctagaagctcccgttgggatcctgtgcttgtatttacggcaaagcatctatcccgtccatccagctcatcagactgttctgtaggtaaataagcatgggggtgtttgtttagagttagaaactaaacaccagtcccctccacttcagtccgattccattgtcgtcttttaaccaaaaaaaagttttcctggccagggatttttgttttgctttgttttagatggagttggggtgttgagatttttgtttgttttaggcatgtaattcctgatgtaatttgatttaaaagtataactgacttgcttttaaatcacatatatagtagctaatgcttaatttgtaatttcaaataaggtgggcattatggttctgtgtattcctgaagtgattaacgatatccttatggttgtcttttttagctgaaatttacctcatgtatggcttagatgatgttgcagtcgatttaaattttggtaaaaatcaagtacagcataaacatttttaactaaatcatttaagttgcaattttacagtcattgaccacaaagcacactaaaaatgtaaattatttttaataacatccggaatgtaaagacagttttaatttttacaaaggaggaagctgaatatgaatatctagaccagcacacaactttgacttaatgtttactgtgtttagcttatagatatgtcgtaggcatttgaagtaaacttctgccccagagaccagaacatggaccagaacatgtaggcctggtccgtgaggcgtgtggggagctgacttagatctgaagtgctttcctctcaaagacaagccacaaggggcatgttttactcaactttccctctctacagtgacagccatctttctttgttctcagacacagcttctcatattgctttcagtcatctgtttataattaaaaattgtgagaagccccatttgatgtttaaaaacaggggtgggggttaatctggcttcacatttctataaggtcgctctggatagggaagtgtggtccagtacagtgaaagtcggaccaggtaaaacatgccattttctttttaaaagcgtgtacttggtcttttgtctgtgtctgttttattccactagagtaaatgtgtccttgatgtaaatgcaaagcatttattaattcgtagatgtagactttacaatataattcaataataaagtaattaacctct

SEQ ID NO: 864 - DNA, 1086 bp, Rattus norvegicus
  Genbank Accession No. NM_012895
atggcagctgcggacgagccgaagcccaagaagctcaaggtggaagcgccagaagcgctgagtgaaaatgtgctgtttggaatggggaatcctcttcttgacatctctgctgtggtagacaaagatttccttgataagtattctctgaaaccaaacgaccagatcttggccgaagacaagcacaaggaattgtttgatgaacttgtaaaaaaattcaaagttgaatatcatgccggtgggtccacgcagaattcaatgaaagtggctcagtggatgattcaggagccacacagagcagcaacgttcttcggatgcattgggatagataagttcggggagatcctgaagagcaaagccgcagatgcacacgtggacgcccattactatgagcagaacgagcagcccacaggaacgtgcgctgcatgcatcaccggtggcaaccggtctcttgttgctaaccttgctgccgccaattgttataagaaagaaaagcaccttgatctggagaacaactggatgttggtagagaaagccagagtttactacatagctggcttctttctcaccgtctccccagagtcagtgttgaaagtggctcgctatgctgccgagaacaacaggaccttcactcttaacctgtccgcaccgttacttagccagttcttcaaggaagccttgatggaagtcatgccttatgttgacatcctctttggaaatgagacggaggctgccacttttgctagagagcaaggctttgagactaaagacattaaagaaatagccagaaagacgcaggctcttccaaaggtgaactcgaagaggcagaggaccgtgatcttcacccaagggagagatgacactatagtagctacaggaaatgatgtcactgctttccctgtcttggatcaaaaccaggaagagatcgttgacaccaatggagctggagatgcatttgtaggagggtttctgtctcagctggtctccaacaagcctctgactgaatgcatccgggccgggcactatgcagcgagcgtcatcattaggcgaactggctgtacttttcctgagaagccaaacttccactga

SEQ ID NO: 865 - DNA, 1116 bp, Rattus norvegicus
  Genbank Accession No. NM_012899
gcctagactccgtcttagcagactgctgtgttccgccggcccccaccatgcaccaccagtccgttctgcacagtggctactttcacccactgcttcgggcctggcagaccaccccctccaccgtcagtgccaccaacctcatctatcccatctttgtcacggatgttcctgatgatgtccagcccattgccagcctcccgggagtggccaggtatggcgtaaaccagctagaggagatgctgagacctctggtggaagccggccttcgctgtgtcctgatctttggcgtccccagcagagttcccaaggatgaacagggctctgcagctgactcagaggactccccaactattgaggctgtccgtctgctgaggaagaccttccctaccctcctagtggcctgtgatgtctgcctgtgcccctacacctcccatggccactgtggcctcctgagtgaaaatggagccttcctagcagaggaaagccgacaacggttggcagaggtggcactggcctatgccaaggcaggttgtcaggttgtagctccatcagacatgatggatggacgagttgaagccatcaaggctgccctgctaaaacatggacttggcaacagggtctctgtgatgagctatagtgccaaatttgcctcctgtttctatggtcctttccgggatgcagctcagtcaagcccagctttcggagaccgacgctgttatcagctgcctcctggagcccgtggcctggccctccgagcagtggcccgggacattcaagagggagctgacatactcatggtaaagccgggattaccctacctggatatggtgcaggaggtgaaggacaagcaccccgagctccccctcgcagtataccaggtgtccggagagtttgccatgttgtggcacggagccaaggctggggcctttgatctcaggactgctgtactggagtccatgacggccttccgcagagccggtgctgacattatcatcacctactttgcaccccagctgttgaagtggctgaaggaagagtgaaggaaagtgaaggacttggtcttgacagagctccctgggccttacagaagggaaaaagtaaaggcgctgttagaac

SEQ ID NO: 866 - DNA, 1017 bp, Rattus norvegicus
  Genbank Accession No. NM_012903
ttcaaagtcctaaaacgcgcggccgtgggttcggggtttattgattgaattccgctggcgcaggatcctctgcagaaagagagagcgcgagagatggagatggacaaacggatttatttagagctgcggaacaggacgccctctgatgtgaaagagctggtcctggataactgtcggtcaattgaaggcaaaatcgaaggcctcacggatgagtttgaagaactggaattcctaagtacaatcaacgtaggcctcacctccatttccaacttaccaaagttaaacaaactcaagaagcttgaattaagcgaaaacagaatctcaggggacctggaagtattggcagagaaatgtccgaaccttaagcatctaaatttaagtggcaacaaaataaaagatctcagcacaatagagccgctgaagaagttagagaatctcaagagcctagacctgtttaactgtgaggtgaccaacctgaatgcctaccgagaaaacgtgttcaagctcctgccccaggtcatgtacctcgatggctatgacagagacaacaaggaggcccctgactctgatgttgagggctacgtggaggatgacgacgaggaagatgaggatgaggaggagtatgatgaatacgcccagctagtggaagatgaagaggaagaggatgaggaggaagaaggggaggaagaggacgtgagtggagaggaagaggaggatgaagaaggttacaacgacggggaagtggatgatgaggaagatgaagaagatgctgctgaagaagaagggagtcagaagcgaaaacgagagcccgatgacgagggccaagaggatgactaaggggaattaacctgtttggggaaattcctattgtgatttgactgtttttacccatatcccctccccctcctattcctgccccccgaaacttatttttttctgattgtagcgttgctgtgggaatgagaggggcaaagtgtactggggattgccgggggtggggtgggggtgggaggggag

SEQ ID NO: 867 - DNA, 1402 bp, Rattus norvegicus
  Genbank Accession No. NM_012904
cgagcaaagcttctcttcagttccctggaagacaaggcaatacaaagatactttattaaaaatggcaatggtatcagaattcctcaagcaggcctgctatattgaaaagcaagagcaggaatatgttcaagctgtaaaatcctacaaaggtggtcctggatcagcagtgagcccctacccttccttcaatccgtcctcggatgttgctgccttgcacaaagctatcatggttaaaggtgtggatgaggcaaccatcattgacatccttaccaagagaaccaatgctcagcgccagcagatcaaggcagcatacttacaggagactgggaagcccctggatgaaaccttgaaaaaagcccttacgggccacctggaggaggttgttttggctatgctcaagaccccagctcagtttgatgcagatgaactccgtgctgccatgaagggacttggaacagatgaagacactctcattgagattttgacaacaagatctaaccagcaaatcagagagattactagagtctacagagaagagctgaaaagagatctggccaaagacatcacttcggacacatctggagactttcgtaatgccttgcttgctctcgccaagggtgatcgctgtgaggatatgagtgtgaatcaagatttggctgatacagatgccagggctttgtatgaagctggagaaaggagaaaggggacagacgtgaatgtgttcaatacaattttgaccacaagaagctatcctcatcttcggaaagtgtttcagaattatagaaagtacagtcaacatgacatgaacaaagccctggatctggaactgaagggtgacattgagaagtgcctcacaaccattgtgaagtgtgccaccagcactccagctttctttgctgagaaactgtatgaagccatgaagggtgctggaactcgccataagacattgatcaggattatggtctcccgttcggaaattgacatgaatgaaatcaaagtattttaccagaagaagtacggaatccctctctgccaagccatcctggatgaaaccaaaggagactatgaaaaaatcctggtggctctgtgtggaggaaactaaacatcccaactgctctgtaagattccgaggagaacatctcttagccgttgttttcttcctattgcaaggcttaagtaggaaagttgctttgtcagtaagtctaattaccttctttgaataatgtagcctataaatatgttttagatcattcatctgtacaatagagaaatacttgttttgttaattatgtttatcccaaattataaatccctgtaagcaagtcactttggtaccattcctgagaaagaagtttacatagaataaaataaaacaattttataagacaaaaaaaaaaaaaaa

SEQ ID NO: 868 - DNA, 1893 bp, Rattus norvegicus
  Genbank Accession No. NM_012912
tgtctcactcagcgagacgcgcggtgcacggtgcttccccggcggacgaccgaccaacccgcgctccggcagagtccttggcgctcgcctgccggcgggacagacagcccgcctctagccgctctctggaccctggccgccccgagcgaagactggagcaaaatgatgcttcaacatccaggccaggtctctgcctcagaagtcagcgcgaccgccatcgtcccctgcctctcacctcctgggtcactggtgtttgaggattttgctaacctgacaccttttgtcaaggaagagctgagattcgccatccagaacaagcacctttgccatcggatgtcctctgcgctggagtcagtcaccatcaacaacagacctctggagatgtcagtcaccaagtctgaggtggcccctgaagaagatgagagaaaaaggaggcggcgggaaagaaacaaaattgctgctgccaagtgtcgaaacaagaaaaaagagaagacagagtgcctgcagaaggagtcagagaaactggagagtgtgaatgccgaactgaaggcccagatcgaggagctgaagaatgagaagcagcatctgatttacatgctcaacctgcaccggcccacgtgtatcgtccgggctcagaacgggcggacgccggaagacgagaggaacctttttatccaacagataaaagaaggaacattgcagagctaagcagaggtggcatgggggcaattggggagtccttactgaatcctccttttccaccccaaaccctgaagccattggaaaactggcttcctgtgcacttctagaatctcagcagccacgagctgttgggtcaggagggcctgcggtgactactgcgttgtcccactctgtccccgagtgaaccgtggagcaggcaggagcatcctttgtctcaccggctccaggatttaggccttaccatcccggccattctcagatgacctagctggccccaggctggggtcccatgcaaagcaggatcgcactaatgggatgcaggcagaagtgtctaccttgacaggtggggtggaccacgtcctccactgcggctgacaacatccctcctagggaagatggagtgagaacattcatcattgaagttgtccaatggccagggtatgctttctagaaactatgctgttctgtcctagactgactgtgcatagggcattcatttctgagcctggtgttgtgctatttagatgtttgtcttgcacaacattggcgtgatttttttccgggagtttcatcagacctgatttccgagagtttgggggtctgccactgtggacaatatcccccaaaagtgtttgggtggccatgtaaactggctgatgaccagctgtgctactctgtgctgaccgaggactgatgcctccttcccctgtacccactgctgaggaagaacccgggcacagcagctgtccttggctacaaactgttacaatgtcacagaacgaaggcacaaagtcccgctttcaaagggcgtaggactccacactcagtgacagggcaggaagagccaaggattctccgttttcccttccttcccaccaaaaaccacagcccgtggagactggtatttgaagccaggagtggggcaaggaaggtgtctgcactgtgggatgttaactgcgcttttgtcttgaagctattttgagatgcggtccagagtatttcagctgggaggtccctcccactggccaccagggctctggctactgttaaaattctgatgtttctgtgaaatcctcagtgttcaatccagactcagtagtatattacagttttctgtaagagagaacgttacttatttatcccagtattcctagcctgtcaacgtaataaaatatcagaatgagacctggt

SEQ ID NO: 869 - DNA, 2534 bp, Rattus norvegicus
  Genbank Accession No. NM_012916
gtgaccgccccccaggcgcgtggagatcaggcttgggacgtcgggccggtgcgcgtgcgggacgcgcggtgtgtggaggggacctcacaagttcttccaagtttgcagcatgatcccattgcttctgtccctgctggcagctctggtcctgacccaagcccctgcagccctcgctgatgacctgaaagaagacagctcagaggatcgagcctttcgggtgcgcatcggtgccgcgcagctgcggggtgtgctgggcggtgccctggccatcccatgccacgtccaccacctgaggccgccgcccagccgccgggccgcgccgggctttccccgagtcaaatggaccttcctgtccggggaccgggaggtggaggtgctggtggcgcgcgggctgcgcgtcaaggtaaacgaagcctatcggttccgcgtggcgctgcctgcctaccccgcatcgctcacagatgtgtctttagtattgagcgaactgcggcccaatgattccggggtctatcgctgcgaggtccagcacggtatcgacgacagcagtgatgctgtggaagtcaaggtcaaaggggtcgtcttcctctaccgagagggctctgcccgctatgctttctccttcgctggagcccaggaagcctgtgctcgcatcggagcccgaattgccacccctgagcagctgtatgctgcctacctcggcggctatgaacagtgtgatgctggctggctgtccgaccaaaccgtgaggtaccccatccagaacccacgagaagcctgttatggagacatggatggctaccctggagtgcggaattacggagtggtgggtcctgatgatctctacgatgtctactgttatgccgaagacctaaatggagaactgttcctaggtgcccctcccggcaagctgacgtgggaggaggctcgggactactgtctggaacgcggtgctcagatcgctagcacgggccagctatacgcggcatggaatggcggcttggacagatgtagccctggctggctggctgatggcagtgtgcggtaccccatcatcacgcccagccaacgctgtgggggaggcctgccaggagtcaagaccctcttcctctttcccaaccagactggcttccccagcaagcagaaccgcttcaatgtctactgcttccgagactctgcccatccctctgccttctctgaggcctccagcccagcctctgatggactagaggccattgtcacagtgacagagaagctggaggaactgcagttgcctcaggaagctgtggagagcgagtctcgtggggcgatctactccatccccatcacagaagatgggggaggaggaagctctaccccagaagacccagcagaggcccccaggactcctctagaatcagaaacccaatccgttgcaccacctaccgggtcctcagaagaggaaggcgaagccctggaggaagaagaaagattcaaagacacagagactccgaaggaagagaaggagcaggagaacctgtgggtgtggcccacggagctcagcagccctctccctactgggttggaaacagagcactcactctcccaggtgtccccaccagcccaggcagttctacaggtgggtgcatcaccttctcccaggcctccaagggtccatggaccgactgtagagactttgcaacccccaggggagggaagcctcacatctactccagatggggcaagagaagtagggggggaaactgggagccctgagctctctggggttcctcgagaaagggaggaggcaggaagctccagcttggaggatggcccttccctccttccagagacatgggcccctgtgggtaccagggaggtggagaccccctcagaagagaagtctggaagaactgttctgacaggcacatcagtgcaggcccagccagtgctgcccaccgacagtgccagccgaggtggagtggctgtggctccctcatcaggtaattctgccgaaggctcgatgcccgcctttctccttttcctcctcctccagctctgggacacctgatcacggtgggcgggcggtctttaatccaccttctccccggaccctctgggcctttgccctcattccctctcctgtctctccctgtggatctttcttccattctgtcccttgcgccccagttctctgatcctctgctccccggccctaccgctgacccccaccactgacccttgggccctctgctgtagctcccatgtcactggccacacaggatgtcctcaagtctcttcctggtgccctcaccagccttctcgacccttgaaggcaggcctgccatctgctgtcccctcccttgtgccttttgttccatccctttaatcacctcccatggattccagggacgcctgagagaccatccctgcccctcacctctggggaccagaatagtcaccccaaagagccttaagccactacttctgtgaagtattttttgactgtttcatggaaaacaagccttggaaataaatctgtattaaactgctttgta

SEQ ID NO: 870 - DNA, 2296 bp, Rattus norvegicus
  Genbank Accession No. NM_012930
cctgcttgctcaggaactccctcagccgccgcgttctctagccgccgttgctgcccgggacgatgatgccgcgcctgctgtttcgtgcctggccccgctgcccctcgcttgtcctgggagcccctagtaggcccttaagtgctgtctcggggccggacgattatctgcagcacagcatcgtgcccaccatgcactaccaggacagcctgcccaggctgcctatccctaaacttgaagacaccatgaagagatacctcaatgcacagaagcctctcttggatgacagccagttcaggagaacagaagcgttgtgtaagaattttgagactggcgttgggaaggagctgcatgcccacctgcttgctcaggataagcagaataagcacaccagctacatctcaggcccctggttcgatatgtatttaactgctcgagactctatcgttttaaactttaatccatttatggcattcaatccggacccaaagtctgagtataatgaccagcttaccagggcaaccaacttgactgtttctgcagtccggtttctgaagacacttcaggctggccttttagaaccagaagtgttccacttgaacccttccaaaagtgacacagacgccttcaaaagactcattcgctttgttcctccctctctgtcctggtatggagcctacctggtcaacgcatatcccctggatatgtcccagtatttccggcttttcaattcaactcgtatacccagacccaatcgtgatgaactctttactgacaccaaggctagacacctcctggtcctaagaaaaggacatttctatgtctttgatgtcctcgatcaagatgggaacattgtgaatcccttagagattcaggcacatctaaagtacattctctcagacagcagccctgtgcccgagtttcctgtggcatatctgaccagtgagaaccgagatgtctgggcagagctcagacagaagttgatttttgatggcaatgaggaaaccctgaagaaagtggactctgctgtcttctgcctctgcctagatgacttcccgatgaaggatcttattcacttgtcacacaccatgctgcacggcgatggcacaaaccgctggtttgataagtcctttaacctcattgtagccgaggacggcactgctgcagtccacttcgagcactcgtggggggatggggtggcagtgcttaggtttttcaatgaagtgttcagagacagcactcagacccctgccatcactccccagagccagcctgccgccaccaactcctctgcgtctgtggagacgctcagcttcaacctcagcggtgctctcaaggctggcatcactgctgccaaggagaagttcgacaccacggtgaaaaccctcagcattgactccattcagttccagagaggtggcaaggagttcctgaagaagaagcagctgagccccgatgcggtggcccagctggccttccagatggccttcctgagacagtatggccagacggtggctacctatgagtcctgcagcactgcagccttcaagcacggccgcacagagactatccgcccagcctccatctttactaagagatgctccgaggcgtttgtcagggacccctccaagcacagtgtgggcgagcttcagcacatgatggctgagtgttccaaataccatggccagctgaccaaagaagcagcgatgggccagggctttgaccgacacttgtatgctctgcgctatctggcaacggccagaggactcaacctacctgagctctatctggatcctgcataccagcagatgaaccacaacatcctgtccaccagcactctgaacagcccagcagtgagccttgggggctttgcccctgtggtccctgatggctttggcattgcatatgctgttcacgatgactggataggctgcaatgtctcctcctactcaggacgcaatgcccgagagtttctccactgtgtccagaagtgcttggaagacattttcgatgctctagaaggcaaagccatcaaaacttagcttcctagtcgctgaaaagcctccattcttcctcatgaacatggatgttcatgtagctggaaggtgccatcttgtgcccaacaaaactaatcccaaggtgcttccacagccagtgctgcaggctgagctggaagagcccaactgaaggtagtgagaggtcgcagctgtaaagccctctttgttcaggagatagggtttggaaaactaactcagctgtatttattgtttaaatagaaataaaacctggtgttgcttag

SEQ ID NO: 871 - DNA, 528 bp, Rattus norvegicus
  Genbank Accession No. NM_012935
atggacatagccatccaccacccctggatccggcgtcccttctttcctttccactccccaagccgcctctttgaccagttcttcggagagcacctgttggagtctgacctcttctctacagccacttccctgagccccttctaccttcggccaccctccttcctgcgggcacctagctggattgacactgggctctcagagatgcgtatggagaaggacaggttctctgtgaacctggacgtgaagcacttctctccagaggaactcaaagtcaaggttctgggagacgtgattgaggtgcacggcaagcacgaagagcgccaggacgaacatggcttcatctccagggagttccacaggaagtaccggatcccagccgacgtggatcctctcaccattacttcttccctgtcatcggatggagtcctcactgtgaatggaccaaggaaacaggcctctggccctgagcgcaccattcccatcacccgtgaagagaagcctgctgtcactgcagcccctaagaagtag

SEQ ID NO: 872 - DNA, 1225 bp, Rattus norvegicus
  Genbank Accession No. NM_012963
gtctggctcccgctctcacagccattgcagtacattgagctccatagagacagcgccggggcaagcgagagccggacgggcactgggcgactctgtgcctcgcggaggaaaatcaactaaacatgggcaaaggagatcctaagaagccgagaggcaaaatgtcctcatatgcattctttgtgcaaacctgccgggaggagcacaagaagaagcacccggatgcttctgtcaacttctcagagttctccaagaagtgctcagagaggtggaagaccatgtctgctaaagaaaaggggaaatttgaagatatggcaaaggctgacaaggctcgttatgaaagagaaatgaaaacctacatcccccccaaaggggagaccaaaaagaagttcaaggaccccaatgcccccaagaggcctccttcggccttcttcttgttctgttctgagtaccgcccaaaaatcaaaggcgagcatcctggcttatccattggtgatgttgcgaagaaactaggagagatgtggaacaacactgctgcggatgacaagcagccctatgaaaagaaggccgccaagctgaaggagaagtatgagaaggatattgctgcctacagagctaaaggaaaacctgatgcagcgaaaaagggggtggtcaaggctgagaagagcaagaaaaagaaggaagaggaagacgacgaggaggatgaagaggatgaggaagaggaggaagaagaggaagacgaagatgaagaagaagatgatgatgatgaataagttggttctacgcatgtttttttttcttgtctataaagcatttaacccccctgtacacaactcactccttttaaagaaaaaaattgaaatgtaaggctgtgtaagatttgtttttaaactgtacagtgtctttttttgtatagttaacacactaccgaatgtgtctttagctagccctgtcctggtggtattttcaatagccactaaccttgcctggtacagtctgggggttgtaaattggcatggaaattaaagcaggttcttgttggtgcacagcacaaattagttatatatggggacagtagttttggttttttggttttctttttttttttgtgtttttgttttttttcctttttgtttttttttccatcttcagttgtctctgatgcagattatacgaaggtaattgttgttctgttaactgaataccactctgtaattgcaaaaaaatg

SEQ ID NO: 873 - DNA, 2602 bp, Rattus norvegicus
  Genbank Accession No. NM_012967
ctgctgcctgcactttgccctggtcctccaatggcttcaacccgtgccaggcccatgctgcctctgctcctggtcctggtcgccgttgtgatccccgggcctgtcggtgctcaggtatccatccatcccacagaagccttcctgcctcggggtggatccgtgcaggtgaactgctcttcctcttgcgaagacgagaacctcggcctggggttggagactaactggatgaaagacgaactatcgagtggacacaactggaagctcttcaagctgagcgacattggggaagacagcagaccactgtgctttgagaactgtggcaccacgcagtcctcggcttctgccaccatcactgtgtattcgttcccagagcgagtggagctggatcctctgcccgcctggcagcaggtgggcaagaacctcatcctgcgctgcctggtggaaggcggagcaccgcggacacagctctcagtagtgctgctccgtgggaatgagacactgagccgccaggcagtggatggggaccccaaggagatcacattcacggtgctggccagcagaggcgaccacggagccaatttctcatgcttcacagaactggacctcaggccacaagggctgtcactgttcaagaatgtctccgaggtcaggcagctccggactttcgatcttccgactagggtcctgaagctcgacacccctgacctcctggaggtgggcacccagcagaagttcttgtgttccctggaaggcctgtttcctgcctctgaagctcagatatacctggagatgggaggccagatgctgaccctggagagcacaaacagcagagattttgtgtcagccactgcctcagtggaggtgactgagaagttggacagaaccctgcagctgcgctgtgttttggagctggcggaccagaccctggagatggagaagaccttgagaatctacaacttttcagctcccatcctgaccctgagccagccggaggtctcagaaggggaccaagtaactgtgaagtgtgaagcccacggtggggcacaggtggtgcttctgaacagtacttcccccaggccacccacctcacagggtacttcccccaggccacccacctcacagatccaattcacactgaatgccagcccggaggatcacaaacgacgcttcttttgctctgcggccttggaggtggatgggaagtccctgtttaaaaaccagaccttggaactccatgtgctatatggtcctcacctggacaagaaggactgcttggggaactggacctggcaagaggggtctcagcagactcttacatgccagccccaggggaatccagcccctaatctgacctgcagccggaaagcagatggtgtcccgctgcctatcgggatggtgaagtctgtcaaacgggagatgaatggtacctacaagtgccgtgcctttagctcccgtgggagtatcaccagggacgtgcacctgacagtgctgtaccatgatcagaatacctgggtcataattgttggtgtgttggtactgatcattgcgggcttcgtgatcgtggcgtccatttacacctattaccgccagaggaagatcaggatatacaagttacagaaggctcaggaggaggccctaaaactcaaggtacaagccccgcctccctgagcccactggacaggacacctgcctgggccccgctgctcttgaacagatcaatggacagcatttacccctcacccacctcctctggctgtcacaggacaggacagtggcctggggatgcatacttgtagcctcaggcctaagaggactcggaggggcaagactgtgaactcgtgacctggacacacctacagcctggtgggcctgcagccaagaaaggctgacttccttctctattacccctgctgaggggccccctaccttaggaaggtgtgatatccggtagacacaagcaagagaagaaaaggaacaccatgcttcctctgacatgggaaagctgggacactgtccccaactcttgttgatgtatttattaattcagagttctgacagttatttattgagtaccctgtacagacactagaggagtgagcaggttaacatgtaagttattgcctagaccctggtgaaggggcacaacagagtctggggaaagatcatacgggtttgggcttctccacaggtcagggtgctttcctcaaaagagctgatttctttcacgagtcatataaatactatgtggacgagcagtggccctctgctcgtagacctctctgggacccctgcctcctcccacagcctggagtctcccagcaccagcatgggtgaccacctccccacctacatacattcctacctttgttcccaatgtcaaccaccatgcctaaatatggacgctcacctttagcagctcaacaatggagtctcatgcccgtgaaattatggtcaatccctgcatgcctccacccggctccacctcaaagagaatgcctgggagaaaatgttccaaccacttagaagggtcctgcaagctgttgtgggagggtaggcacccctcccagcgcagaagcctttcctttgaatcaataaagtttta

SEQ ID NO: 874 - DNA, 5581 bp, Rattus norvegicus
  Genbank Accession No. NM_012974
agtgactgctggtcggaccctgggacagactgagggcctggagggaaaccagcccagtacccacacggatggagtgggcctcaggaaaaccagggaggggcaggcagggacagcctgtgccatgggaacttcgcttgggcctacttctaagtgtgctggctgccacattggcccaagtcccatccttggatgtacctggctgttctcgaggaagctgctatccagccaccggtgacctgttggtgggccgtgcagacagactgacagcctcctccacgtgtggcttgcatagccctcaaccctactgtattgtcagtcacctgcaggatgaaaagaagtgcttcctgtgtgactcccgacgtcccttctctgctcgagacaacccaaatagtcaccggatccagaatgtagtcactagctttgcgccacaacgccggacggcctggtggcagtcggagaacggtgttccgatggtcaccatccaactggacctggaagctgagtttcatttcacccacctcatcatgaccttcaagacatttcgtcctgcggccatgctggtggagcgctctgcagacttcggccgcacgtggcgtgtctaccgatatttttcctacgactgcggggctgacttcccaggaatcccgctggccccgccgcgtcgctgggatgatgtagtgtgtgagtcccgctactcagaaattgagccatctactgaaggcgaggtcatctatcgtgtgctggatcctgctattcctattccagacccctacagctcacggattcagaacctgttgaagatcaccaacctccgtgtgaacctcacccggcttcacacactgggagacaacttgcttgacccacggcgggagatccgggaaaaatattattatgctctctatgaacttgtcatccgcgggaactgcttctgctatggacatgcctcacagtgtgcgcctgcaccaggggcaccggcccatgctgagggcatggtacatggggcctgtatttgcaagcacaatactcgtgggctcaactgtgagcagtgtcaggatttctatcaggaccttccctggcatcctgctgaggatggccatactcacgcctgtcggaagtgtgagtgcaacgggcatagtcatagctgccactttgacatggctgtgtacctggcatctggaaacgtaagtggaggtgtctgcgatggctgtcagcacaacacggctgggcgccactgcgagctctgccggcccttcttctaccgtgacccaaccaaggacatgcgggatccagctgcgtgccgtccttgtgactgtgacccaatgggttctcaagacggtggccgctgtgattcccatgatgaccctgtgctaggtctggtctcaggccagtgtcgctgcaaagaacacgtggttggcactcgctgccagcaatgccgggacggcttctttggacttagtgccagcaaccctcgaggatgtcagcgttgtcagtgtaactcaaggggcacagtgcctgggggcaccccttgtgactccagtagtggaacctgtttctgcaagcgtctggtgactggagacggctgtgaccgctgtctgcctggccactggggcctgagccatgacctgctaggctgccgcccctgtgactgtgatgtgggcggtgccttggatcctcagtgtgatgaagccacgggtcagtgcccgtgccgcccacacatgattgggcggcgctgtgaacaagtacagcctggctacttccggccttttctagaccatctaacctgggaggctgagggtgcccatgggcaggtgcttgaggtggtagaacgtctggtgaccaaccgagagactccgtcctggactggtgtaggctttgtgcgactgcgggaaggtcaggaagtggagttcctggtgacctctttgcctagggccatggactatgacctgctactgcgctgggagccccaggttcctgagcagtgggcagagctggaattggtggtgcagcgcccagggcctgtgtctgcacacagtccgtgtgggcacgtgctgccgagggatgaccgcattcaggggatgcttcacccaaacaccagggttttggtgtttcccagacctgtctgccttgagcctggtctctcctacaagctgaagttgaaattgactggaacagggggacgtgcccatcctgaaaccccatactctggatctggaatactcattgactcgctggtgctgcagccccatgtcttgatgctagagatgtttagtgggggggatgctgctgccctggaacgccgtaccacctttgaacgctaccgctgccatgaggaaggtctgatgcccagcaagacccccctatctgaggcctgcgttcccctcctcatcagtgcgtcctccctggtctacaatggcgccttgccctgccagtgtgaccctcaaggctcactgagttccgaatgcaatcctcatggtggccagtgccggtgcaagcctggagtggttggacgacgctgtgatgcctgtgctactggctactatggctttgggcccgcaggctgtcaagcctgccagtgtagtcccgacggagcactcagtgccctgtgtgaagggactagtggacagtgtctctgccgaaccggtgcctttggtcttcgctgtgaccactgtcaacgtggccagtggggtttccctaactgccggccgtgtgtctgcaacgggcgtgcagatgagtgtgacgcccacacaggcgcttgcctgggctgccgtgattacacagggggcgagcactgtgagaggtgcattgctggttttcatggggacccacggctgccatatgggggccagtgccggccttgtccctgccctgaaggccccgggagccagcgacactttgctacttcatgtcaccgggatggatattcccagcaaattgtgtgccactgtcgagcaggctacacagggcttcggtgtgaggcttgtgcccccgggcactttggggacccatccaagccaggtggcaggtgccaactgtgtgagtgcagtgggaacattgaccccacggatcccggtgcctgtgatccccacacggggcaatgcttgcgctgtttacaccacacggaggggccccactgtggccattgcaagcctggcttccatgggcaagctgcccgacagagctgtcaccgctgtacctgcaaccttctgggcacagatccccagcggtgcccatctacagacctgtgccattgtgacccaagcactgggcagtgcccatgcctcccccatgtccaaggcctcagttgcgaccgttgtgcccccaacttttggaactttaccagtggacgtggctgccagccttgtgcttgtcacccaagccgggccagaggccctacctgcaatgagttcacagggcagtgccactgtcatgctggctttggtgggaggacctgttctgagtgccaagagctccactggggagaccctggactgcagtgccgcgcctgtgactgtgatcccagaggaatagacaaaccccaatgtcatcgttctactggtcactgtagctgccgcccaggcgtgtctggcgtgcgctgcgaccagtgtgctcgtggcttctcgggtgtttttcctgcttgtcacccctgccatgcatgctttggagactgggatcgtgtggtacaggaccttgctgctcgtacgcggcgcctggagcagtgggctcaggaattgcagcaaacgggtgtgctgggtgcctttgagagcagctttttaaacctgcaggggaagctgggaatggtgcaggccatcgtggctgcccgcaacacctcagctgcgtctactgcaaagcttgtagaggccacagagggactgcgtcatgaaattgggaagaccactgaacgcctgactcagttagaagcagagctcacagatgtacaggatgagaacttcaatgccaaccatgcactcagtggtctggagagagacgggctcgcacttaatctcacactgaggcagcttgaccagcatctggatatcctcaaacactcaaatttcttaggtgcctatgacagcatccgacatgcccacagtcagtctacagaagcagagcgccgggccaatgcctccacctttgcaatacccagccctgtgagcaactcagcagatacccggcgtcgggcagaagtgctaatgggtgcccaaagagagaacttcaaccgccagcacttggccaaccagcaggcacttggacggctgtccacacacacccataccctgagcctgacgggagtaaatgagctggtgtgtggggccccaggggacgcaccctgtgctaccagcccttgtgggggtgctggatgtcgggatgaggatgggcaaccccgctgtggtggcctcggttgcagtggagcagcagccacagcagatctagcactgggccgggctcggcacacacaggcagagctgcagagagcgctggtagaaggtggtggcatcctcagccgagtgtctgagactcgtcggcaggcagaggaggcccagcaacgagcacaggcagccctggacaaggctaatgcttctaggggccaagtggagcaggccaatcaggagcttcgagaacttatccagaatgtgaaggacttcctcagccaggagggagctgatcccgacagtattgaaatggtagcaacacgggtgctagacatctccatcccagcctcgcctgagcagatccagcgcctagcaagtgagattgcagaacgtgtccgaagcctggcggatgtggacacaatcctggcacataccatgggggatgtgcgtcgggctgaacagctactgcaagatgcacagcgggcacggagccgggctgagggtgagagacagaaggcagagacagtccaagcggcactggaggaggcccagagggcacagggagctgctcagggcgccatccggggagcagtggttgacacaaaaaacacagagcagaccctgcagcaggtccaggagaggatggcaggtacagagcagtctctgaactctgctagtgagcgggctcggcagttacatgcccttctggaagccctgaaactgaaaagggcaggaaacagcctggcagcatctacagctgaagagacagcaggcagtgcccagagccgtgccagggaggctgagaaacagctacgggaacaagtaggtgaccagtaccaaactgtgagggcgttggctgaacggaaggctgaaggtgttctggccgcacaagccagagcagaacaactgcgggatgaggctcggggtctgttgcaggctgctcaggacaagttgcagcggctacaggaactggagggcacatatgaagagaatgaacgcgaactggaggtcaaagcggctcagctggatgggctggaggccaggatgcgcagtgtgcttcaggcaatcaacctgcaggtccagatctacaacacctgccagtgaccactccctagggtttagccttgtctccaagcacagttccacatgcgtttgtccgcacattaaagagctcttggctagcaagtgctttcaataaaccagtgtgaacc

SEQ ID NO: 875 - DNA, 1232 bp, Rattus norvegicus
  Genbank Accession No. NM_012992
gttttccgtccggcttctctcacactcaagtgcgcgcctccacctcatggaagactcgatggacatggacatgagccctcttaggcctcagaactaccttttcggttgtgaactaaaggctgacaaagattatcactttaaagtggataatgatgaaaatgagcaccagttatcattaagaacggtcagtttaggagcaggggcaaaagatgagttgcacatcgtagaggcagaagcaatgaactatgaaggcagcccaattaaagtaacactggcaactttgaaaatgtctgtacaaccaacagtttcccttgggggcttcgaaattacaccacctgtggtcttgaggttgaagtgtggttctgggcctgtgcacataagtggacagcacctagtagctgtagaggaagatgcagagtcagaagatgaagatgaggaagatgtaaaactcttaggcatgtctggaaagagatctgctcccggaggtggtaacaaagtcccacagaaaaaagtaaaacttgatgaagatgatgatgaggatgatgaagatgatgaggatgatgaagatgatgatgatgatgattttgatgaagaggaaactgaagaaaaggttccagtgaagaaatctgtacgagataccccagccaaaaatgcacaaaaatcaaaccaaaatgggaaagatttaaaaccatcaacaccaaggtcaaagggtcaagagtccttcaaaaaacaggaaaaaactcccaaaacacccaaaggacctagctctgtagaagacattaaggcaaaaatgcaagcaagtatagaaaaaggtggttctcttcccaaagtggaagccaagttcattaattatgtgaagaattgtttccggatgactgaccaggaggctattcaagatctctggcagtggaggaagtctctttaagaaaatggtttaaacagtttgaaataattctgtcttcatttctgtaatagttgctatctggctgtcctttttataatgcaaagtgagaactttccctactgtgtttgataaatgttgtccaggttcaattgccaagaatgtgttgtctaaaatgcctgtttagttttcaaggatggaactccgccctttacttggttttaagtatgtatggaatgttatgataggacatagtagtagtggtggtcagatgtggaaatggtagggagacaaatatacatgtgaaataaactcagtattttaataaagt

SEQ ID NO: 876 - DNA, 4153 bp, Rattus norvegicus
  Genbank Accession No. NM_012999
tcgggcgccgcgcgagcctgccgctgccatgcctccgcgcgcgccgccagcgcccgggccccggccgccgccccgggccgccggccggcacgggctctcgccgctggcgccgcgcccctggcgttggctgcttctgctcgctctgcccgccgtctgctccgcgctgccgccgccgcgccccgtctacaccaaccactgggcagtgcaagtgctgggcggccccggcgcggcggaccgcgtggctgcggctcacggctacctcaacttgggccagattggaaatctggacgattactatcatttttaccacagcaagaccttcaagagatcaaccttgagtagcaggggcccccacaccttcctcagaatggacccacaggtaaaatggctccagcaacaggaagtgaaacgcagggtcaagagacaggcgcgaagcgactctctttatttcaatgatcccatttggtccaacatgtggtatatgcattgtgctgataagaacagtcgctgtcggtcagagatgaacgtccaggcggcatggaagcgcggctacacaggaaagaacgtggttgtcaccatcctcgatgacggcatagaaaggaatcacccagacctggcccccaactacgattcctatgcaagctacgatgtcaacggaaacgattatgacccatcaccgagatatgatgccagcaacgagaacaaacatggtactcgctgtgcgggagaagtcgctgcttcagccaacaactcctactgcatcgtgggcatagcatataatgcaaagataggaggcatccggatgctggacggtgacgtgaccgacgtggttgaggccaagtctctgggcatcagacccaactacattgacatttacagcgctagttgggggccagatgatgatgggaagaccgtggatgggcccggccgtctggctaaacaggctttcgagtatggcattaaaaagggccgccaaggtctgggctccatttttgtctgggcctctgggaatggtgggagagaaggggaccactgctcctgtgatggctacaccaacagcatctacaccatctctgtgagcagcaccactgagaacggccacaaaccctggtacctggaggaatgtgcttccaccttggctaccacctacagcagcggggccttctatgaacggaagatcgtcaccacggacctgcgtcagcgctgcaccgacggccacactgggacatctgtctcagctcccatggtggctggcatcattgccctggctctagaagcaaacaaccagttgacctggagggacgtgcagcacctgttagtaaagacgtcacggccggctcatctgaaggcgagtgactggaaagtcaacggagctgggcataaagttagccatctctatggatttggcttggtggatgctgaagcgctcgtcctagaggcaaggaagtggacggcagtgccatcccagcacatgtgcgtggccaccgcagacaaaaggcccaggagcatccccgtagtgcaggtgctgcggaccacagccctgaccaatgcctgtgcagaccactctgaccagcgtgtggtgtacctggagcatgtggtagtccgaatctctatctcacatccacgacggggtgacctccagatccacctgatttctccctctggaaccaagtctcaacttttggcaaagagattgctggatttttccaatgaggggttcacgaactgggagttcatgactgtccactgctggggagaaaaggctgaaggtgaatggaccctggaagtccaggatataccatcgcaggtccgcaacccagagaaacaaggaaagttgaaagaatggagcctcattttatatggcactgcagagcacccataccgcaccttcagctcccaccagtctcgctcacggatgctggagctttcagtcccggaacaggagcctctcaaggctgagggaccaccaccgcaggcagagactccagaagaagaggaagagtacacaggtgtgtgccatccagagtgtggtgataaaggctgcgatggtcccagtgcagaccagtgcttgaactgcgtccacttcagcctgggaaactccaagacaaacaggaagtgtgtgagcgagtgccccttgggctactttggggacacagcagcaagacgctgccgtcgatgccataagggatgtgagacatgcacgggcaggagcccaacacagtgcctgtcttgtcgccgtgggttctatcaccaccaggaaacgaacacatgtgtgaccctgtgtcctgccggactttatgctgatgaaagtcagagactctgcctcaggtgccacccgagctgtcagaagtgtgtggatgaacctgagaagtcgactgtgtgcaaggagggattcagcctcgcacggggcagctgcattccggactgtgaaccaggtacctacttcgattctgagctcatcagatgtggggaatgccatcacacctgccggacctgcgtggggcccagcagagaagaatgtattcactgtgcaaaaagcttccacttccaagactggaaatgtgtgccggcctgtggtgagggcttctacccggaggagatgcctggcttaccccacaaagtgtgtcgaagatgtgatgaaaactgcctgagctgcgagggctccagcaggaactgcagcagatgtaaagctggcttcacgcagctggggacctcctgcatcaccaaccacacgtgcagtaacgccgatgagaccttctgcgagatggtaaagtccaaccggctctgtgaacggaagctcttcatccagttttgttgccgcacctgcctcctggctgggtagggcgggcgccagctgccacagagggcagggtcctcctgtctgcccttttgcccagctaccttcctacagatggccagccatagcccattccttggggtggccctgagtctgacagctgtgccctcccccccccagagctgggtcccactgcagcatctctgagcacctgaactaggtggaggtggcccttaaggataaggctaaatcggcaaaaatccccctgaactctgcttgctggctgcagtctaaagctggactcgaaataggaacagagtgaattatgagactcatgcctgcagcttgggagtggcttctgggaccctagtttactgaaacttcaagaccaaagcagaaaaagagagatgcctggcatcccatcaagtcctcctcccacacattcgtgtgaccgtgacagatctcaccgagttggctggcaggaccccatgctgtcctcacctataatgaagggcctcgcttcctccccatgcatcactggccaccaaacagcctgagggatggtttgatgagactgtaaataaaataggtttcagggcataagatgtatgaccactggggatagaacctatgtctacacagctccttccgaaactacagccccctgactggaaggtccggcaccagactgaagtaggtctactcatcctctcctcagcattctcctctgagtgagctgagctgtccaagtgactgttcaacctgtgtcccagggcctcctgggcctgagccaccagtcatctacagatacagagcctgtggaggagggtccaaaggagctacttaaggctagccgaaagacctctaatggccaagcagttcctccttatgcaaagccagccccaaatcactaatcgccagccctccatggcacacaactgcttctcaagtgcatttggcctccacactcaggactctgttctcgggtggacactgctctggcccagtatagtacaagcctacgttgatagagctggattgatttttctgccaagcctgtgtgggcattttataagctacgtgttctaatttttaccgatgttaattattttgacaaatatttcatatattttcattgaaatgcgcagatctgcttggtccagttccctttaacgtgggaataacatttgccttaaatttttccaacctcgtctctctccatatggtcctgctctcctctctgaatataatgtgttttgtcttgtcacctgtaagtggcaaggactcagctgttgtctgttgaatccacaacttcaaataagaaatcagtgaagcaaatctaatgttaaccctgag

SEQ ID NO: 877 - DNA, 1687 bp, Rattus norvegicus
  Genbank Accession No. NM_013011
cccagagactgccgagccgggtccgtgtgccgccacccactccggacacagaatatccagttatggataaaaatgagctggtgcagaaggccaagctggccgagcaggcagagcgatacgatgacatggcagcctgcatgaagtctgtcactgagcaaggagccgagctgtctaacgaggagaggaaccttctctctgttgcttataaaaacgttgtaggagcccgtaggtcatcttggagggtcgtctcgagtattgagcagaagacggaaggtgctgagaaaaagcagcagatggctcgagaatacagagagaagatcgagatggagctgagggacatctgcaacgacgtactgtctcttttggaaaagttcttgatccccaatgcttcgcagccagaaagcaaagtcttctatttgaaaatgaagggtgactactaccgctacttggctgaggttgctgctggtgatgacaagaaaggaattgtggaccagtcacagcaagcataccaagaagcatttgaaatcagcaaaaaggagatgcagccgacacaccccatcagactgggtctggccctcaacttctctgtgttctactatgagatcctgaactccccagagaaagcctgctctcttgcaaaaacagcttttgatgaagccattgctgaacttgatacattaagtgaagagtcgtacaaagacagcacgctaataatgcagttactgagagacaacttgacattgtggacatcggatacccaaggagacgaagcagaagcgggagaaggaggggaaaattaaccggccttccaacctttgtctgcctcattctaaaatttacacagtagaccatttgtcatccatgctgtcccacagatagtttttttgtttacgatttatgacaggtttatgttacttctatttgaatttctatatttcccatgtggttttatgttttaatattaggggagtagagccagttaactttagggagttactcgttttcatcttgaggtggccaatatgggatgtggaatttttacatgagttacacatgtttggcatagttagtacttttggtccattgtggcttcagaagggccagtgttcaaactgcttccatgtctaagcaaagaaaactgcctacatattggtgtgtgctggcggggaataaacaggataatgggtccagtcatgagtgtagtctgtgtgggtactgtaaggcttggagcacttgtgaggctgggacacgaacaccctgtggatgcacgctaagaccgtgtgtctgcgtgcacacccttgaccacagctccagaagttgtctgtagacaaagttgtgacccaatttactctgataagggcagaaacggttcacattccattatttgtaaagttacctgctgtttgctttcattatttttgctacacattttatttgtatttaaatgttttaggcaatctaagaacaaatgtaaaagtaaagatgcagtacaaacgagttgcttggtgttcccggctccatgcggatcaagcacagcggtaaacaaaatcccatgtatttaactttttttttttaagttttttgttttgttttgtttttgcttttgtgattttttttctctttttgatacttgcctaacatgcatgtgctgtaaaaatagttaacagggaaataacttgagatgacg

SEQ ID NO: 878 - DNA, 2440 bp, Rattus norvegicus
  Genbank Accession No. NM_013030
agcagtcgagctggagctgagccatagtcaaggactcattgtgggtgcccatcatgatgtcctacagcgagagattggggggaccggctgtctccccacttccagtccgtgggagacacatggtgcatggggcagcctttgcttatgtccccagcccacaagtcctgcacaggattcctgggacaaccacctatgccatctccagtctgagcccggtagccctcacagagcacagctgtccctatggggaggtcctggaatgtcatgacccgctccctgccaagctggcccaggaagaggagcaaaagccagagcccaggctgtcccagaagcttgcccaggttggcacaaagctcctgaaggtgccgttgatgctaggcttcctttacctctttgtctgctccctggacgtgctcagctctgccttccaactggccggagggaaagtggctggggacatcttcaaggacaatgccatcctgtccaacccagtggcagggctggtggtgggaatcctggtgacagttctggtgcagagctccagcacctcgacatccatcattgtcagcatggtctcctctggcttgttggaggtgagctccgccattccgataatcatgggctccaacatcgggacctctgtcaccaacaccattgtggccctgatgcaggcgggggacaggactgacttcaggcgggcttttgcaggggcaacagtgcatgactgctttaactggctgtctgttctggtcctgctgcccctggaggctgccacgggctacctgcaccacgtcaccgggcttgtggttgcctccttcaacatccgtggtggccgtgatgcccctgaccttctcaaggttatcacagagcccttcacaaagcttatcatccagctggacaagtctgtgattaccagcattgccgtgggggatgagtccctgaggaatcacagtctcattcggatttggtgtcaaccagagacaaaagaggcttccacttctatgtccagggtagaggccattggcagccttgcaaacaccaccatggagaaatgcaaccatatcttcgtggatactgggctgcccgacctggccgtggggctcattctgctggcgggctccctggtggtcctgtgcacttgtcttatcctcctcgtcaagatgctcaactctctgctgaagggccaagtggccaatgtcatccagaaggtcatcaacacagacttcccagcccccttcacttgggtcacaggctactttgccatggtggtgggcgccagcatgacgtttgttgtccagagcagttccgtgttcacctcagccatcactccgctcattggcctgggtgtgatcagtattgagcgggcctaccctctcaccctgggctccaacattggtaccaccactacagccatcctggcagcactggccagccccagggagaagctctccagctcctttcagattgccctctgccacttcttcttcaacatctcgggcatcctcctgtggtacccgctgccctgcacacgtctgcccatccgcatggccaaggcactgggcaaacgcactgccaagtaccgctggtttgccgtcctctacctcctcgtgtgcttcctgctcctgccctcactggtgtttggcatttctatggcaggctggcaggctatggtcggtgtgggcacaccctttggggccctgctcgccttcgtggtgcttgttaacgtcctgcagagtcgaagtcccgggcacctccccaagtggctgcagacatgggacttcctaccccgctggatgcactctctgcagcccctggatggccttatcacaagagccaccttgtgctatgccaggcccgagccccgttcaccccaacttccccccagagtcttcctggaggagcttcctcctgccacgccctctccccgcctggcactgcccgctcaccacaatgccacccggctctaggctgcaggtccagactattgcctggaggcgagggacgggatttttacagagcccacagtagaaaggcacagcatgtttgtgagtgtgtgtgcatgcatgtagatgcatgtcacttgaggtacatgattttgtgccacccttgggtacctgtccctactcagggccacagcggggtgggctttttttgcaattaagaagcagtgtgcacaaattacatgctaggtcctgagcctttgtggccatcaggacaggagtatgcgagtgcatggtgtgggtacaggggatgcagatgcatgaggagcccccaaaattttctgggaagagtcggctatgccctctcaccttctcactacccttgtcccaacaggagaggcagaagagcagctggccttctgtatacatgagcctttcctctgccaattctgctaactgtgcatagaaaaagttttaaaagttgcatctgtcctgatcat

SEQ ID NO: 879 - DNA, 3226 bp, Rattus norvegicus
  Genbank Accession No. NM_013038
gaattcccgtccggcgggtccccgctcgtcgccccccccgggtgcggggcgggtccccccgcgggcgttgggaccggggtccggtgcggagagccattcgtcccgggaaacggggtgcggccggaaagggggccgccctctcgcccgtgcacgcttaacgcacgttcgtgtggaacctggcgctaaaccattcgtagacgacctgcttctgggtcggggtttcgtacgtagcagagcagctccctcgctgcgatcggaattccgggcccggagactcgaagaacgccatggcccccattggcctcaaggcggtggtcggagagaagatcatgcatgatgttatcaagaaggtgaagaagaagggcgagtggaaggtgctggtggtggaccagttaagcatgaggatgctgtcttcctgctgcaagatgacagacatcatgaccgaggggatcacaattgtggaggatatcaacaagcgccgagagccgctccccagcctagaggccgtgtacctcatcaccccgtctgagaagtctgtccactctctcatcagtgattttaaggacccgccgactgctaaatatcgggccgcacatgtgttcttcacagactcatgtccagatgccctgtttaacgagctggtaaaatctcgagcagccaaagtcatcaagacgctgacggaaatcaacattgcgtttctcccctatgagtcccaggtgtattccctggactccgctgactctttccaaagtttctacagccctcacaaggcacagatgaagaatcccatactggaacgcctggcagagcaaatcgccaccctgtgtgccaccctgaaggagtacccggctgtgcggtatcggggggagtacaaggacaatgccttgctggctcagctgatccaggacaagctggacgcttataaagctgatgacccgacaatgggggagggtcccgacaaggcacggtcccagctcctgatcctggatcgtggctttgaccccagctcccctgtgcttcatgaactgacgtttcaggctatgagttacgacctgctgcctattgaaaatgatgtttacaagtatgagaccagcggcattggagaggcgagggtgaaggaggtgctcctggatgaggacgatgacctgtggattgcactgcgacacaagcacatcgcagaggtgtcccaggaagtgacccggtctctgaaggacttttcctctagcaagaggatgaatactggagagaagaccaccatgcgggacctgtcccagatgctgaagaaaatgccccagtaccagaaggagctcagcaagtattcgactcacctgcaccttgctgaagactgtatgaagcattaccaaggcaccgtagacaaactctgccgcgtggagcaggacctggcgatgggcacagatgctgagggggaaaaaatcaaggaccccatgagagccattgtccccatcctgctggatgcaaatgtcagcacttatgacaaaattcgcatcatccttctctacatcttcctgaagaacggtatcactgaagaaaacctaaacaaactcatccagcacgcccagatccccccagaagacagtgagatcatcaccaacatggctcacctcggggtgcccatcgtcacggattccacactacgccgcagaagcaagccggagcggaaggagcgcatcagtgagcagacctaccagctctcacgatggaccccgatcattaaagacattatggaggacaccattgaagacaaactggatacaaagcactacccatacatctctacccgctcttccgcatccttcagcaccactgctgtgagtgcccgctatggacattggcacaagaataaggcccccggggagtaccgcagcggcccccgcctcattattttcatccttgggggcgtgagcctgaatgagatgcgctgtgcctacgaagtgacgcaggccaacggcaagtgggaagtgctcataggatccacgcacattctcaccccacagaaactgctggacacgctgaagaagctgaataaaacagacgaagaaataagcagttaaaatcagctgccctccaaaaccctggctcccttcccacaatgctctgcagctccccagtgcgacacctcggttactctgctgcctccccagccctgcacgccctggccaccctgttgccgcgctgagttcttctcctgtgcgatgacaccccatcttgtcctctgaaaagcaagagagtaatgtgttgttttttaaaaatgagtatcttctgtatgtatcccacagtaagttcacatgcaagctccacactgcagaagcatcagaactctggaccgagtggactctcccttatttatgaccccgtgacctgtatatagccctgtaccacgcgtgcacattgcttggatatggaaaggtagatgtgtaagtgtttctcagagcttgtttgggctcatttctgttcttgttggaatcataaggtctctgtccccaagatatgacatgctgaggaagtgatgtttttctctctagcccctgctcaccccgttctcatgcacagacactgagatgaggtgagcagacacctctggaggctggcgtggaatgagcctcctctttgcagctgtgggtggaggcttggcatatccacaggaagccagtctgagtgctagccagtgttgtctccagagcatgacactgcattccctgacctgtgtccacagtgctgtaacaagttaagtcctccagactaaatgagcatgcctagcagacttgggtcctccagagttaggtatgaccagcccagtccttcccgagccttctcgtgagcatagccgggatagaggtcaaaggtcaggagtgaactggaagatgtgagtttggcactctggtcaaagctaggcctgaggagggggccctgctgctcagtcagagtgtcctcagtttaagatacttcatcaatctttgtgtagtgtacattcatgtgtcattgtggttgtatgaaaacaatcattttttctttgtattaaagtcatcactgtataaaacatagctagctataaagcagaaattccagaagcagatgctggaaggatggtctccatcctcaggacgcagcagctccctgagcatgcgactcaccctgctgctgtagtcatgaaacatacagtggaagtcacaaaaatgtccccagcccagcccctgcccctcctccg

SEQ ID NO: 880 - DNA, 431 bp, Rattus norvegicus
  Genbank Accession No. NM_013042
gaagtttgcgtgctgccatggagaccagagccttctggacaaccctgctgctggtcctggttgctgggtcctcctgcaaagcccaggaatttgttggcctatctccaagccaatgtatggctccaacaaatgtcagggtggactgtaactaccccactgtcacatcagagcagtgtaacaaccgtggttgctgttttgactccagcatcccaaatgtgccctggtgcttcaaacctctgcaagagacagaatgtacattttgaagctgtccaggctccaggaagggagctccacaccctggactcttgctgatggtagtggcccagggtaacactcacccctgatctgctccctcgcgccggccaatataggagctgggagtccagaagaataaagaccttacagtcagcacaaggctgttctaattgcgg

SEQ ID NO: 881 - DNA, 1666 bp, Rattus norvegicus
  Genbank Accession No. NM_013043
cggcagccgagtcggattgagctgctgcagacgccaggccactccagccagcactgccgttttcacgccccggctgcagacagctaggaggctttatctagtttgaaccaggctgctggagctcgctccttccctctctttttttccacgaggctgtttttttatttggctgcaattgcatgaaatcccaatggtgtagaccagtggcgatggatctaggagtttaccaactgagacatttttcaatttctttcttgtcgtctttgctgggaactgaaaacgcttccgtgagacttgacaatagctctggtgcaagtgtggtagctatcgacaacaaaatagagcaagctatggatctggtgaaaagccatttgatgtatgcagttagagaggaagtggaggttctgaaggagcagatcaaagaactaatagagaaaaactcccaactggagcaggagaacaatctgttgaagacactggccagtccggagcagctcgcccagtttcaggcccagctgcagactggctcccctccggctaccacgcagccacaggggaccacacagccccctgcacagccagcgtcccagggctcaggatcaaccgcatagcctgctatgccccaacagaactggctgctgctgtctgaactgaacagaccgaagagatgtgctagtgagaagccgcctccagtcacccatttcattgctgtctgcgaaagagacgtgagactcacacatgctgttctcgctttctccccagtattaagcactcatatgcttttggcttgaagaaatatactagttgagtgaattaaaggttaaacagagagtgagcatggatgtaccctgtgcaacgtggcagatgtctgaggaatggtttgattgacgctgaggaggagctctgtgccttttcaaccctccccagccgcccactctactcccaagctctggggctcgcctgcatggggctcagaaggtgggctgctcctggattttgtgttctcctctccttcccttcaaagaatttgagaggccagaaacgagactgcaaagggggggatgcagtccttttacaaaaccgacaactgtcaccaaagcttataaaacaggacagtactgtccctcttttctgaaacatcagaagacacaaaactgttagtgacacaacggtgacaggtagctgggacctaggctatcttattatgaaggttgttttgcttgttgtatatttgtgtatgtagtgtaacgaatttgtacaatagaggaccgtaactactgttaggttgtacagattgaagtttagatgttccattggctgtctgaaaaggtgtggattgtccttcctagagagatctacttaaaaactgcttcgtgacaaaaaccacacctgaagaaattttaagaatttggcacagttagtcactttgtgtcacccggaatctagctgctgagtcttgcaaagtaaaccccctgttgactgatgtcagttgagctagtgaatgaatagatggagaaacgtcagtcagttgctgaggaagtggatttcccagtaggggtttctgcagctcacctgtatagtcctgcgcatgttccccacacagaacccactgtatttacctgttctacttgtcacctttcaataaagcatatcaaatgttgatacc

SEQ ID NO: 882 - DNA, 1689 bp, Rattus norvegicus
  Genbank Accession No. NM_013052
tgcagccagctagcgagaaggcgcgagcggcggcgcagccagcagcctcccgccagccggcgagccagtgcgcgtgcgcggcggcggcctcggcggcgaccgggaagcggacgggcgggcgaggcgagcgaggcaggcggtgcgggcgtgcgaggcgaggccgatcgcgagcgacatgggggaccgagagcagctgctgcagcgggcgcgactggcggagcaggcggagcgctacgacgacatggcctccgccatgaaggcggtgacagagctgaatgaacctctatctaatgaagatagaaatctcctctctgtggcctacaagaatgtagttggtgccaggcgatcttcttggagggttattagtagcattgagcagaaaaccatggcagatgggaatgagaagaagctggagaaagtcaaagcctatcgggagaagattgagaaggagctggagacagtttgcaatgatgtcttggctctgctcgacaagttccttatcaagaactgcaatgattttcagtacgagagcaaggtgttctacctgaaaatgaagggcgattactaccgctacctggcagaggtggcttctggggagaagaaaaacagtgtggttgaagcttctgaggcagcgtataaggaagccttcgaaatcagcaaagagcacatgcagccaacacaccccatccggcttggcctggccctcaatttttctgtgttctactatgagatccagaatgcaccagagcaggcctgcctcttagccaaacaagccttcgatgatgctatagctgagctggacacattaaacgaggattcctataaggactccactctcatcatgcagttgctgcgagacaacctcaccctctggacgagcgaccagcaggatgaagaagccggagaaggcaactgaagacccatcaggtccctggcccttcctttacccaccacccccattatcactgattcttccttgccacaatcactatatctagtgctaaacctatctgtattggcagcacagctattcagatctgccctcctgtcccttggaagcagtttcagataaaccttcatgggcatttgctggactgatggttgctttgagccacagagcgctccctttttgaattgtgcagagaagtgtgttctgaacgaggcattttattatgtctgttgatctgtagcaaatccatgtgatggtaattgagtgtagaaaggagaattagccaacacaggctatggctgctatttaaaacaagctgatagtgtgttgttaagcagtacatctcgtgcatgcaaaaatgaatttgaccctctcaccccttctttcagctaatggaaactgacacacgacaacttgttccttcaccatcagctttataaactgtttctcgtgagctttcaggcccctgctgtgcctctttaaattatgatgtgcgcacaccttcttttcaatgcaatgcatcagaggtttttgatatgtgtaacttttttttttggttgtgattaagaatcatggatttattttttgtaactctttggctattgttcttgtgtaccctgacagcatcatgtgtgtcaacctgtgtcaatcatgatgggtggttatgaaatgccagattgctaaaataaatgttttggacttaaaaagagtaaataaatgctgctttggggatattaaaa

SEQ ID NO: 883 - DNA, 2415 bp, Rattus norvegicus
  Genbank Accession No. NM_013059
cacggcgctccttagggccaccgctcggcgcgccgggacagaccctccccactcctgcctgcaggatcggaacgtcaattaacggctgacactgccccccacctcttcccacccatctgggctccagcgaggaacggatctcggggtacaccatgatcttgccatttttagtactggccatcggaccctgccttaccaactcatttgtgccagagaaagagaaagaccccagttactggcgacagcaagcccaagagaccttgaaaaatgccctgaaactccaaaaactcaacaccaacgtggccaagaacatcatcatgttcctgggagatggtatgggcgtctccacagtgacagctgcccgcatccttaagggccagctacaccacaacacgggcgaggagacacggctggagatggacaagttcccctttgtggctctctccaagacgtacaacaccaacgctcaggtccccgacagcgcgggcactgccactgcctacttgtgtggcgtgaaggccaacgagggcaccgtgggagtgagcgcggccactgagcgcacgcgatgcaacaccactcaggggaacgaggtcacgtccatcctgcgctgggccaaggatgctgggaagtccgtgggcatcgtgaccaccactcgggtgaaccacgccactcccagtgcagcctatgcgcactcggccgatcgggactggtactcggacaatgagatgcgcccagaggctctgagccagggctgcaaggacatcgcctatcagctaatgcacaacatcaaggacatcgatgtgatcatgggtggtggccggaagtacatgtaccccaagaacagaactgatgtggaatatgaactggatgagaaggccaggggcaccagactggatggcctggacctcatcagcatttggaagagcttcaaacctagacacaagcactcccactatgtctggaaccgcactgaactgctggcccttgacccctccagggtggactacctcttaggtctctttgagcccggggacatgcagtatgagttgaatcggaacaacctgactgacccttccctctcggagatggtggaggtggccctccggatcctgacaaagaatcccaaaggcttcttcttgctagtggaaggaggcaggattgaccacgggcaccatgaaggcaaggccaagcaggcgctgcatgaggccgtggagatggatgaggccatcggaaaggcgggcaccatgacttcccagaaagacacgttgactgtggttactgctgatcactcccacgttttcacgtttggtggctacacccccaggggcaactccatttttggtctggctcccatggtgagcgacacggacaagaagcccttcacagccatcctgtatggcaacgggcctggttacaaggtggtggacggtgaacgggagaacgtctccatggtggattatgctcacaacaactaccaggcccagtccgctgtccccctgcggcacgagacccacggtggggaagatgtggcggtctttgccaagggccctatggctcacctgcttcacggcgtccatgagcagaactacatcccccacgtcatggcgtatgcctcctgcattggagccaaccttgaccactgtgcctgggccagctctgcgagcagcccctccccaggggccctgctgcttccactggctctgttccccctacgcaccctgttctgagggcccaggtcccacaagagcccacaatggacagccggctcccctccctttgtggcctgccacctggccgcccacactcaacggggaggcccaggcaacctcgagcaggaacagaagtttgctacctgcctcacttccgcccggaaccctccgtgggtcggattcctggctctgccgttgtttctctattcactgccttttggccagcagggtgggtttctctcttgggccggcaggacacagactgcgcagattcccaaagcaccttatttttctaccaaatatactctccagaccctgcaaccatcatggaacattccagatctgaccttctctcccctaccccttctctctggaacactgggtcccatagtcacagccagtccctcaacccaaccctccttggagggaagaccaggtctgctcagggtgagactcccaggaagccacctccggggttggctgtctacccagggtggccaggctgggaagaacaacccagccggacaggacgcacacactccccacccagctccagagactcgccaacccttcactgaagcgactcccctgtttggaatagcaaaaaaaaaaagaaagaaaaaaaagaaaaaaattttaatttctctttttggtgttggttaaaagggaacacaagacatttaaataaaatgttccaaataaaaaa

SEQ ID NO: 884 - DNA, 2153 bp, Rattus norvegicus
  Genbank Accession No. NM_013082
cgtcccctccgttctgcatccccaaacttcagccgcagctctgtttcaacccatcggctgcttgcttcaaatcagacagcaccgcgacccagacacccgagtccgcggagtgaaagcacaacgccgagtaggaccagaccaggaaaatagactcgtgaagcagcaactctggattgggagggcagaagccaacaagtgagaaggcgcggcgtttccggggcgctgtgcgaaagctagagcaggcgccagagaagacagctcgagctcagaacccgagaccaagcctctctcccggaggcagctcagctcctatcttctctaggcccgctgcagcgtgcgctgggcttcgttttatgcgggtacgagccacgtccccggggaatatgcagcgtgcgtggatcctgctcaccttgggcttgatggcctgtgtgtcggcagagacgagagcagagctgacatctgataaggacatgtaccttgacagcagctccattgaggaagcttcaggattatatcctattgatgatgatgactattcttctgcctctggctcaggagcttatgaagacaaagggagtccagatctgacaacatcccaactgattccaaggatctccctcactagtgctgctcccgaagtggaaaccatgacgttgaagacacaaagcatcacacccactcagaccgagtcacccgaagaaactgacaagaaggagtttgaaatctctgaggcagaagaaaagcaggaccctgctgtaaaaagcacagacgtgtacaccgagaaacattcagacaatctgttcaagcggacggaagttctagcagctgtcattgctggcggtgtgattggctttctctttgccattttcctcatcctgttgttggtgtaccgcatgcggaagaaagacgaaggaagctacgaccttggagaacgcaaaccgtccagcgcagcttaccagaaggcacccactaaggagttttatgcataaaactcccacttagtgtctctatttaagagatcactgaacttttcaaaataaagctttagcatagaataatgaatatctttgttatctgttttgttcattacagagccatgctggccctttaatgatgaagatcccattgtatttaaaatttttcatatatttctttagaatgacttaaaagtaaaaatttaacatctgcagtgttctgtgaatagcagtggcaaaatattttgttacaaaaacccttgacattcatggaattgatttgaacatctatgtgcaaatacaaaatgattgtgtttgtcctctggttcaaagatgactgctgttcccctcatcagcagatctccagttgaccttaccgagttgatctttgttaatttatctcttgttcctcttctctgccctcccttcttgtctcctcccttaaaaacaaaaccttatgccttttgtagctgtcatggtgcaatttgtctttgaatgattacaataatggtaatttagtgtatatgtgatttttttcaattatgtaaactttaacctcctctttatgtaatttttttaaatgtcagactacccattttacacttgctttaatttccattccctgtagcttcaggcagatttgcaaaggcaaattataaaattggattattactacgaaactgttagtcctagttatctaagcagtcttctcttggaggatttgacatcactgacaagcctcagcaaacccaaagatgctaacagtatttgagaagttgctacagactcctttggccactgtacttgctagtttacaatttgaaggtacaaggaagagtttaaaggaaaaaaaagatcagtttttgttcttaaaaatgcatttaagttgtaaacatctttttaagcctttgaagtgcctatgattctatgtaacttgttgcagactggtgttaatgagtatatataacagtttttaaaaagttggtattttataagcacagacaattctaatggtaacttttgtagtcttatgaatagacataaattgtaatttgggaacaagcaaactactgaataaatcacatggcctaatattgaaaatgtcactgttataaatttgtacatttcttatcaaatgtacagcttccctttgctatgactgactgtctgttctcagtg

SEQ ID NO: 885 - DNA, 556 bp, Rattus norvegicus
  Genbank Accession No. NM_013096
acattctccttctgatagactcaggaagcaatcatggtgctctctgcagatgacaaaaccaacatcaagaactgctgggggaagattggtggccatggtggtgaatatggcgaggaggccctacagaggatgttcgctgccttccccaccaccaagacctacttctctcacattgatgtaagccccggctctgcccaggtcaaggctcacggcaagaaggttgctgatgccttggccaaagctgcagaccacgtcgaagacctgcctggtgccctgtccactctgagcgacctgcatgcccacaaactgcgtgtggatcctgtcaacttcaagttcctgagccactgcctgctggtgaccttggcttgccaccaccctggagatttcacacccgccatgcacgcctctctggacaaattccttgcctctgtgagcactgtgctgacctccaagtaccgttaagccgcctcctgccgggcttgccttctgaccaggcccttcttccctcccttgcacctatacctcttggtctttgaataaagcctgagtaggaagc

SEQ ID NO: 886 - DNA, 1143 bp, Rattus norvegicus
  Genbank Accession No. NM_013097
cggagacatctctgtgtcagcggtgagtgagctccccttgttcatcgacagttccagagcagactcggggctcatcataccaacagagcaggtctgttctggctactgcagccatctgagtggctttcaggatgaggtacacagggctgatgggaatactgctcaccctggtcaacctgctgcagctggctgcgactctgagaattgcagccttcaacatccggacttttggggatactaagatgtctaatgccaccctctctagctacattgtgaaaatcctgagtcgctatgacattgctgtggtccaagaggtcagagacactcacctggttgctgttgggaagctactggatgaactcaatcgggacatccctgacaactatcgctatataatcagtgagccgctgggccgcaaaagctacaaggaacagtacctttttgtgtacaggcccagccaggtgtctgttttggatagctatcattatgacgatggctgtgaaccctgtggaaatgacaccttcagccgagagccagccattgtcaagttcttttccccatacactgaggtccgagagtttgcgattgtgcccttgcactcagccccaacagaggctgtgagtgagatcgatgccctctacgatgtttatctagatgtccggcaaaagtggggcctggaggacatcatgttcatgggagatttcaatgctggctgcagctacgtcacttcctcccaatggtcttccattcgccttcggacaagccccatcttccagtggctgatccctgacagtgcggacaccacagccacatccacacactgtgcttatgacaggattgtggttgctggagctctgctccaggctgctgttgttcccagctcggctgtcccctttgacttccaagcagaatacagacttaccaaccagatggctgaagccatcagtgaccattacccagtggaggtgacactcagaaagacctgatgtcattgagttcagccacactgcttccggtgaggaagagtccacctcacctatgtgtggtactgcggcattccaacacctcggcacagggaatgtctaccacgcggacttagaaatactgtttaattggagtaaataaagctgagcctgagcaggt

SEQ ID NO: 887 - DNA, 554 bp, Rattus norvegicus
  Genbank Accession No. NM_013102
gccgccgccgccgccgccgccgccatgggagtgcaggtggagaccatctcttctggagacgggcgcaccttcccgaagcgcggccagacctgcgtggtacactacacggggatgcttgaagatgggaagaaatttgactcctctcgggacagaaacaagccttttaagtttacactaggcaagcaggaggtgatccgaggctgggaagaaggggtagcccagatgagtgtgggccagagagccaaactgataatctccccagactatgcctatggagccaccgggcacacaggcatcatcccaccacatgctactcttgtttttgatgtggagcttctaaaactggaatgacagaagtggcctcctcccttagctctgcacatggatctgccatggaggaatctggtacctccagatgggtgcacatgaatccatgggagcttttcctgatgtcccaccactctttgtatagacacctactaactgaatgtgttccgtcactcagctttgcttcggacacctccatgtcctcttcccccttctgtatgtgtgtt

SEQ ID NO: 888 - DNA, 2328 bp, Rattus norvegicus
  Genbank Accession No. NM_013103
cacaaccccttctttttccgttcttggaaaatggtgtccaagctcacgtctctccagcaagaactcctgagtgccctgctgagctccggagtcaccaaggaagtgctgatccaggccttggaggaattactgccgtccccgaatttcggggtgaagctggagacactgcccctgtcccccgggagcggggcggatctcgacaccaagccggttttccatactctcaccaatggccacgccaagggccgcttgtctggggacgagggctcagaggacggcgacgactatgacactcctcccatcctcaaagagctccaggcgctcaacaccgaggaggccgcggagcagcgggccgaggtggaccggatgctcagtgaggacccatggagggccgccaaaatgatcaagggatacatgcaacagcacaacatcccccagagggaggtggttgatgtcacaggcctgaaccaatcccacctttctcaacacctcaacaagggcacccccatgaagacccagaagcgagctgccctgtacacctggtacgtcagaaagcaacgggagatcctccgacagttcaaccagacagtccagagctctggaaacatgacagacaaaagcagtcaggatcagctgctatttctctttccagagttcagtcaacagaaccagggccctgggcagtcggaggacgcctgctctgagcccaccaacaagaagatgcgccgcaaccggttcaaatgggggcccgcatcccagcaaattttgtaccaggcctacgaccggcaaaagaatcccagcaaggaagagagggaggccttagtggaggagtgtaacagggcagaatgtttgcaacgaggggtctccccctccaaagcccatggcctaggctccaacttggtcacggaggtccgtgtctacaactggtttgcaaaccgccggaaggaagaggcattcagacagaagctggccatggatgcctatagctccaaccagacgcacaacctgaaccccctgctcacccatggctcccctcaccaccagccaagctcctctccacccaacaagttgtcaggagtgcgctacagccaaccgggaaacaatgaggtcacttcctcttcgacaatcagtcaccatggtaacagtgccatggtgaccagccagtcagttttacaacaagtctccccggccagcctggacccaggccacagtctcctctcacctgacagtaaaatgatctcggtgtctggaggaggactgcccccggtcagcaccttgacgaatatccacagcctctcccaccacaatccccagcaatctcaaaacctcatcatgactcccctgtccggagtcatggccattgcacagagcctcaacacctcccaagcccagggtgtcccagtcatcaacagtgtggctagcagcctggcagccctacagcccgtccagttctctcaacagctgcacagccctcaccagcagcccctcatgcagcagagcccaggcagtcacatggcccagcagcccttcatggctgcggtgactcagctacagaactcccacatgtatgcacataagcaggagccccctcagtattcccacacctcccggttcccatctgcaatggtggtcacagataccagtagcatcaataccctcaccagcatgtcttccagtaaacagtgtccactgcaagcctggtgatacccacataaccactcactttgtgcacagcaacgaggaccccattttccacaccatcagtttctgggcatctgtcatagagaagtccagcgacctgacaggcacctgggaagccaggagagatccctgcttacctgacatctgccggggacctccgacaagcccaagccactctcaggaggtgcagcccgaagcccagcttctcttctttgcagtattgtcgtaatgcctctcccaagatgccaagtgcccttgtttctcccagaggtggccggtgcaaaatggtgcaacaggaatcgagaagcccatggagtttccactgcaatccgtcattgaacaaactgatgcaaaaacttgaatctgttactgaaataagatgaggaccgaggagggtgtgtgctactgaactgagccagacactgtaaataactgacagacccccctctcccatcccagtgtctcaagatttcttctaaagaagtaaatttgtcaatgggtgtaaactatcaactactgtattaagtgcaatttttccttccacagatatctacccctgcccgatataatactaaagtgtctatcacttttcttgtaaaggtagagttaaattccaaaaaaaaaaaa

SEQ ID NO: 889 - DNA, 970 bp, Rattus norvegicus
  Genbank Accession No. NM_013104
gcgccatgacctgggacggactgcccacacagccgctgttgatgctgttaatgctgttgttcgctgcgggctccgagtccgccttagcggggtgcccgggctgcgggccgggggtgcaggaggaagacgcggggtcgcctgcagacggctgtgcagagaccggaggctgtttcaggagagaggggcaaccgtgcggggtctacatccctaagtgcgccccaggactgcagtgccaaccccgagagaacgaagagacacctttgcgggcgctgctgatcggccagggccgctgtcaacgcgccagagggccgtcggaagagactaccaaggagagcaaaccccatggaggcgcctcccgcccacgtgacagagaccggcaaaagaatccacggacctcggctgcccctataaggcccagtcctgttcaagatggtgaaatgggcccctgccgcagacacttggattcagtactgcagcagctccagactgaggtcttcagaggcggagcaaatgggctctatgtgccaaactgtgacctcagaggtttctaccgcaagcagcagtgtcgttcctcgcaggggaatcgccgtggtccctgctggtgtgtggatccgatgggccagcctttgccagtgtctccagatggccagggaagctctcagtgctctgccaggagcagcgggtgaaacctggtgggagcctccaggaccctggcaggagcatggggctgtcatttgagctctatgtgaagtgatgataactctgtgccccgagatgagacccaccttcaagccctaccccattgtccctgtcacccctgggcctttacacagcaagttagaaagattgttgttggcttgtgtactaataaagctggacacaagggtttgtctttcaatagatcgcagcgagggagctgctctgctacgtacgaaaccccgacccagaagcaggtcgcccgtcacgccgc

SEQ ID NO: 890 - DNA, 3466 bp, Rattus norvegicus
  Genbank Accession No. NM_013126
agggaataagcggcggggagggagctccccggcaagcgcgcaaccaagtgttgcatggtgaggaattgacagcgttttgggattggcctggactacagcaagaacatgttacctgaggagtagcacaagtctttcactagctgccgagaggagtccacagctgtcatccaccctcaagtgccctacaagtcccaaaggcatcactcactgctcatctgtaatgagccaggccctgagcggcctcggcttcttgctggtgaccggaacaccatccgtgggtcttgaagcgatcacactcggctgaaagatgagtgacgggcaatgggtctgtctctcatcagaagaatttgatcaacttcagaaatactctgaatattcctccaagaagataaaagatgtgttggctgagtttaatgaaggtggaagcctcaagcaatatgacccacacaagcccattagctatgatgtcttcaagctgttcatgagggcatacctggaggtggatcttcctcagccactgagcacaaacctcttcctggccttcagccagaagcccagacaagagacacctgaccacccaaaggagggggccagcagtagtgagccgaatgtctcagattctaatgcggagagcactgccaaagcggatgctgcctgcgctccagacactgaatcaaaaccgatcaagacacaggtaccgtctgaagaactagaggctgcagccccatggggagaacctaacgctccggcttcaagctccgatgcccccatagtgtacctgaaggatgtggtgtgttacttgtccctgatggagaccgggaggcctcaggataaactagaattcatgtttcgtctctatgactcggatgaaaatgaactcctggaccaagcggagctggatcaaattgtgagccaaatgctacatgttgcccagtacctggagtgggatcccacagagctcagacctatactgaaggagatgttgcaaggcatggactacaacaaggatggcttcgtgtctctagaggagtgggtcagtggggggatgaccaccatcccgttgctggtcctcctgggaatggatgactccgcctccaagggggatgggaggcacgcctggaccctgaagcacttcaagaagcccacttactgcaacttctgccacatcatgctgatgggcgttcggaagcaaggcctgtgctgcatctactgtaaatatgctgtccaccaacgctgtgtatccaacagcattcctggatgtgtgaaaacatactccaaagccaaaaggagcggtgaggtgatgcagcacgcgtgggtggaagggaactcctccgtcaagtgtgaccggtgccacaaaagtatcaagtgctaccagagtgtcactgcgcggcactgcgtgtggtgccggatgacgtttcaccgcaaatgtgaattgtcgacagcgtgcgatggtggggaactcaaagaccacattttgctgcctacctccatataccctgtcacccgagaccggcaagcagggaagtccgatagcggtgcggcggccaagggtgaacttgtaatgcagtataagatcatcccaagtccggggacgcatcccctgctggtcctggtgaacccgaagagtggaggaagacaaggagaaagaattcttcagaaattccactacctgctcaaccccaaacaagttttcaacctggacaaaggggggcctacgccaggattgaacttctttcaggataccccggacttccgtgttcttgcctgtggcggagatgggacagttggctggattttggattgcattgacaaggccaacttcacaaagcatccaccggtggctgtcctgcctcttgggacagggaacgacctcgcacgatgtcttcgctggggaggaggttatgaggggggcagcttgaccaaaatcctgaaggaaattgaacagagccccttggtgatgctggaccgttggtacctagaggtcatgcccagggaagaggtggagaacggagaccaggtcccatacaacatcatgaacaactatttctccattggtgtggatgcttcaattgcacacagattccatgtgatgagagagaaacaccctgaaaaattcaacagcaggatgaagaacaagctgtggtatttcgaatttggtacctctgaaacctttgcagctacctgcaagaaactccatgaccacatagagctggagtgcgatggtgttgaggtggacctgagcaatatcttcctggaaggcattgccattcttaacattcccagcatgtacggaggcaccaatctctggggagaaaccaagaagaaccgagctgtgatccgggaaagcaggaagagcgtcacagacccaaaggagctgaaatgttgtgtccaagacctcagtgaccagcttcttgaagtggtgggtctagagggagccatggagatgggacagatctataccggcctgaagagtgcaggcaggaggctagcccagtgctcctctgtcaccattaggactaagaagcttctgccgatgcaagtggatggagaaccctggatgcagccgccatgcatgattaaaatcactcacaaaaaccaggcacctatgatgatggggcctccccagaagagcagcttcttttctctgaggaggaaaagccgttcaaaggactaaacgatatgccaagcaccagctctaccaagaaaggaaagaagaatatacacgcacacacacatgcacacgcaccaatgcagacacacgcgcacacgagcacgcacacacgtacgaacgcacgcatgcacctataaccagaggaagcaaaagccaccttccacctgccatgtggtctacctattttgaaaatggatccactcctaacagagccaatacccatgagatatcccggatggactcagggcccacgaagaccgggttggctcatacagcgactttcacattcccacaggctttagactttgagcctgaaggagacatctccctttttctgcaccacactccagtaaggctccaggctgtaggtttcctcgctacagcaagatcggatgtggtcaagggaaagagctccaacccagaaaacttacacaaaagtccttctgtacaaaaacaaaacagcctacagctctccaagcaaaatccttggcagggctcattgagcacaggatggtctctttgccgtccttcaagcaacagctcctcccttaacttgcagaggaaagccaagaagctgtggaaagccgtttccattcttggttccctctgctgtccatgggtacttgttcgcttcctgaagcatctcttggtgtctgttttgcttagagagcaaacaagcgtgctggggcagcatactttagatgtggtatttattttcatagttcctatgaacacttgggagggagagctgagaaagtggactttatttttcaaattgatgtcataatgttgtgt

SEQ ID NO: 891 - DNA, 1417 bp, Rattus norvegicus
  Genbank Accession No. NM_013132
gtcctgctctcaaccgcagcctgcgccctaccttctgcagctccagcctactcctgaccgacagcatcatggctctcagaggcaccgtgactgacttctctggattcgacggcagggctgatgccgaagttcttcggaaggccatgaaaggcttgggcaccgacgaggacagcatcctgaacctgttgacagcccggagcaacgctcagcgccagcagattgctgaggagtttaagactctgtttggcagggaccttgtgaatgacatgaagtctgaactgaccggaaagtttgagaagttaattgtggctttgatgaagccctcccggctctacgacgcctacgagctgaaacacgctcttaagggagctgggacagatgagaaagtgttgactgaaatcattgcctcaaggacacctgaagagctcagggccataaaacaagcttatgaagaagaatatggttccaacctggaagatgatgtggtgggggatacctcagggtactaccagaggatgttggtggtcctccttcaggccaatagagaccctgacactgcaattgatgatgctcaagttgaactggatgctcaggcattgttccaggctggagagctgaagtgggggacggatgaagaaaagttcatcaccatccttgggacacgcagtgtgtctcatttaagaagagtgtttgacaagtacatgacaatatcaggatttcagattgaggaaaccattgaccgagagacctcagggaacttggagaacttactcctggctgtcgtgaagtctattcggagcatacctgcctaccttgcagagaccctctactatgctatgaagggtgctgggacggacgatcacaccctcatcagagtcatagtgtcgaggagtgagattgatctgtttaacatcaggaaggagtttaggaagaacttcgccacgtccctgtactctatgatcaagggcgacacatctggagactataagaaggccctgctgctcctctgtggaggcgaggatgactgaggagctgcctggagtgccctgggcccgcctgctgcccaccatcagcttccttcagcaccacgcctacttacgttcaatgcctgcctgcctgccacgctgccttactcacacgagtgtgtgctaatgaccaaagctgtctcgaatgaaagcagtgttctgctgttctgtctgacagaccttcccacgtctctcagtctagtatctctaagttgcgttttctatcctcttctaaagcttcatttatattaagttaataaccatattaccttgaacggaaccttagccatgaaattgtgaactcttggaagtgctgtcaatcaagcttagtgctctagctgacctgaaaaattaagatggtcgtaatatcagaaacgttgccgacaaataaa

SEQ ID NO: 892 - DNA, 8806 bp, Rattus norvegicus
  Genbank Accession No. NM_013138
ccggatcgtccaagtcgccgggctgcgaggtggcactgcgctcctttccgcccagcgcgcctcagtcctctgcaccgagcctggcagctcgcttctgggcgactttgccgcctcgagccccggaggccaaagccatgaatgaaatgtccagctttcttcacatcggggacattgtgtccctgtacgccgagggctctgtcaacggcttcatcagcactttggggctggtggatgaccgttgtgtggtggagcctgcagctggggacctggacaacccccccaagaagttccgagattgcctcttcaaagtgtgccccatgaaccgctactccgcacagaagcagtactggaaagccaagcagactaagcaggacaaagagaagatcgccgatgtggtgttgctgcagaagctgcagcatgcagcccagatggagcagaagcaaaacgacacagagaacaagaaggtgcacggggacgtggtgaagtacggcagcgtgattcagcttctgcacatgaagagcaacaaatacttaacggtgaacaagcggctgccggccctgctggagaagaacgccatgcgggtgacgctggacgcgacgggcaacgagggctcctggctcttcatccagcccttctggaagcttcggagcaatggggataacgtggttgtgggggacaaggtgatcctgaaccctgtcaacgcagggcagcctctacacgccagcaactatgagcttagtgataacgttggctgcaaggaggtcaactctgtcaactgcaacaccagctggaagatcaacttattcatgcagttccgggaccatctggaggaggtgttgaaggggggagacgtggtgcggctgttccatgcagagcaggagaagttcctgacctgtgacgagtaccggggcaagcttcaggtgttcctgaggaccacgctgcgtcagtccgccacctcggccaccagctccaacgcgctctgggaggtggaggtggtccaccatgacccctgccgcggcggagcgggacactggaatggtctgtacaggttcaagcacctggccacgggcaactatctggcggctgaggaaaaccccagctacaagggtgatgtctcagatcctaaggcagcaggaccaggggcccagagccgcacaggccgcagaaacgccggcgagaagatcaagtaccgtctggtggctgtgccacatggcaacgacatcgcgtctctcttcgagctggaccccaccacgctgcagaaaaccgactccttcgtgccccggaactcctacgtgcggctgcggcacctctgtaccaacacctggatccagagcacgaacgcgcccatcgacgtggaggaggaacggcctatccggctcatgttgggcacgtgccccaccaaggaggacaaggaggcctttgccattgtgtcggttcccgtgtctgagatccgcgacctggactttgccaacgatgcaagctccatgctggccagcgctgtggagaaactcaacgagggcttcatcagccagaacgaccgcaggtttgtcatccagctgttggaggacttggtgttttttgtcagcgatgttcccaacaatgggcagaatgtcctggacatcatggtcaccaaacccaaccgagagcggcagaagctgatgcgggacgagaacatacttaagcagatctttggcatcctgaaggctccattccgtgacaaggggggtgaagggccattggtgcgtctggaggaactgtctgaccagaagaacgccccctaccagtacatgttccgcctgtgttaccgggtgctccggcactcccaggaggactaccgtaagaaccaggagcacatagccaagcagttcgggatgatgcagtcacagattggctatgacatcctggccgaagacaccatcacggccctgctgcacaacaaccggaagctgctggagaagcacatcaccaagaccgaggtggaaaccttcgtgagcctcgtgcgcaagaacagggagcccaggttcctggactacctctccgacctgtgcgtgtccaaccgcattgccatccccgtcacccaggagctgatttgcaagtgtgtgctggaccccaagaacagtgacatccttatccagactgagcttcggcccgtgaaggagatggctcagtctcacgagtacctcagcatcgagtactcggaggaggaggtgtggctcacatggacggacaggaacaacgagcatcacgagaagagtgtgaggcagctggcccaggaggcaagggccggcaacgcacacgacgagaacgtgctcagctactacaggtaccagttgaagctgtttgcccgcatgtgcctagaccgccagtacctggccatcgacgagatctccaagcaactgggtgtggagctgcttttcctatgcatggcggacgagatgctgccctttgacctccgcgcctcattctgccacctgatgctacatgtgcacgtggaccgtgacccccaggagctggtgacccctgtcaagtttgcccgcctctggacagagatccccacggccatcaccatcaaagactatgattccaatctcaacgcctcccgagatgacaagaaaaacaagtttgccagcaccatggagttcgtggaggattaccttaacaacgtggtcggcgaggccgtgccctttgccaacgatgagaagaacatactgacctttgaggtggtcagcctggcacacaacctcatctacttcgggttctacagcttcagcgagctgctgcgactcacacgcacgttgctgggcatcatcgactgcattcaggcaccagccgctgtgctgcaggcctatgaggagcctggcggcaagaacgtgcggaggtccatccagggggtgggacacatgatgtccaccatggtgctaagccgcaagcagtctgtatttggtgcctccagcctgcctactggagtgggtgtccccgagcagctggacagaagcaaatttgaggacaatgaacacaccgtggtgatggagaccaagctgaagatcctggagatcctgcagttcatcctcaacgtgcgcctagactaccgcatctcctacctgctgtcggtcttcaagaaggagtttgtggaggtctttcccatgcaggacagcggggcagacggcacagcccccgccttcgattcctctactgccaacatgaatctggaccgcatcggggagcaggcagaggccatgtttggagtagggaagaccagcagcatgctagaggtggatgacgaagggggtcgcatgttcctgcgagtgctgctgcacctcaccatgcacgactacccacctctggtctccggcgccctgcagctgctcttcaaacatttcagccagcgccaggaggccatgcacaccttcaagcaggtgcagctgctcatctcagcccaggatgtggagaactacaaagtgatcaagtcggaactggatcgactgcggacgatggtggagaagtcggagctgtgggtggacaagaaaggcagcgtcaagggcgaggagggggaggcgggcgccagcaaggataagaaggagcggccctcggatgaggagggatttctgcagccacacggggagaagagcagtgagaactaccagattgtcaaaggcatcctggagaggctgaacaagatgtgtggggtcggggagcagatgcgaaagaagcaacagagactgctgaagaacatggacgcccacaaggtcatgctggacctgctgcagatcccttatgacaagaacgacaacaagatgatggagatcctgcgctacacacaccagttcctacagaagttctgtgccgggaaccctggcaaccaggcccttctgcacaagcacttgcagctcttcctcacgcccgggctcctggaggctgagaccatgcagcacattttcctcaacaactatcagctgtgctctgagatcagcgagccggtgctgcaacacttcgtgcactgctggccgacacacgggcgccacgtgcagtacctggacttcctgcataccgtcatcaaggccgagggcaagtacgtgaagaagtgtcaggacatgatcatgaccgagctgaccaacgcaggcgacgacgtggtggtgttctacaatgacaaggcctctctggcccatctgctggacatgatgaaggcagcccgagatggcgtggaggaccacagccccctcatgtaccacatctccctggtggacttgctggctgcctgtgcagaaggcaaaaatgtctacacagagatcaagtgcacttccctgctgcctctagaggacgtggtgtcggtggtgacccacgaggactgcatcacggaggttaaaatggcgtatgtgaacttcgtgaaccactgctatgtagacacggaggtggagatgaaggagatctataccagcaaccacatctggacgctcttcgagaacttcaccctggacatggctctggtctgtaacaagcgggagaagcgcctgtcagaccccacccttgagaagtacgtgctcaccgtggtgctggacaccatcagcgccttcttcagttccccattttcagagaacagcacatccctacagacgcatcagacaattgtggttcagctgctgcagtccaccacccggctgctcgagtgtccttggctgcagcagcagcacaagggctcggtggaggcctgtgtccgcaccctcgccatggtggccaagagtagagccatcttgctgccgatggatctggatgcccacatgagcgctctgctcagcagtgggggcagctgctcagccgcggcccaacgcagcgctgccaactacaagacggccacgaggaccttccctcgggtcatccccaccgccaaccagtgggactacaagaacatcattgagaagttacaggacatcatcacggccctagaagagcggctgaagcctctggtgcaggccgagctctcggtgctggtggacatgctgcactggcccgagctgctctttctagagggcagtgaggcctaccagcgctgcgagagtggcggcttcctgtccaagctcatccgtcacaccaagggtctcatggagtcggaggagaagctgtgcgtgaaggtgctgcggacgctgcagcagatgctgcagaagaagagcaagtatggggaccggggcaaccagctaaggaagatgctgctgcagaattacctccagaaccggaagtccggtccccggggcgagctcactgaccccacaggctctggcgtggatcaggactggtccgccatcgcagccacccagtgccggctggacaaggagggggccaccaagttggtgtgtgatctcatcaccagcaccaagaacgagaagatcttccaggagagcatcggcctggccatccgcctgctggacgggggcaacactgagatccagaagtctttctacaacctgatgacaagtgacaagaagtcagagcgcttcttcaaagtgctgcatgaccgcatgaagcgtgcccagcaggagaccaagtccacagttgccgtcaacatgagtgacctgggcagccagcctcgtgaggaccgtgagccagcagaccctaccaccaaaggtcgcgtgtcctccttctccatgcccagctcctcccgatattcgctgggccctggcttgcaccgggggcacgacgtgagcgagcgtgcgcagaacaacgagatggggacctcggtgctcatcatgcggcccatcctgcgcttcctgcagctgctgtgtgagaaccataaccgggacctgcagaacttcctgcgctgtcagaacaacaagaccaactacaacctcgtgtgtgagaccctgcagttcctggacatcatgtgtggcagcaccacagggggcctggggctgctggggctctacatcaacgaggacaatgtgggcctggtcatccagaccttggagaccctcacagagtactgccagggcccgtgccatgagaaccagacctgcatcgtgactcacgagtccaacggcattgacatcatcacggcgctgatcctcaatgacatcagcccgctctgcaagtaccgcatggacctggtgctgcagctcaaggacaatgcctccaagctgctcctggctctgatggagagtcgacatgacagcgagaatgcagaacgcatcctcatcagccttcggcctcaggagctggtggacgtgatcaagaaggcctacctgcaggaggaggagcgggaaaattccgaagtgagcccacgtgaagtgggccacaacatctacatcctggcactgcagctttccaggcacaacaagcagctacagcacctgctgaagccggtgaagcgcatccaggaggaggaggccgagggcatctcttccatgctcagcctcaacaacaagcagctctctcagatgctcaagtcctcagcccctgcccaagaggaggaggaagacccgctggcctactatgagaaccacacctcgcagattgagattgtgcggcaagaccgaagcatggagcagatcgtgttcccggtacctgccatctgccagttcctgacagaggagaccaagcaccggctcttcaccaccacggagcaggacgagcagggcagcaaagtgagcgacttcttcgaccagtcctccttcctgcacaacgagatggagtggcagcgccggcttcgcagcatgccgctcatctactggttctcccgccgcatgacgctgtggggtagcatctccttcaacctggcagtgttcatcaacatcatcattgccttcttctacccctacgtggaaggcgcgtccacgggcgtgctgggctccccactcatctcgctcctcttctggatcctcatctgcttctccattgccgcgctgttcaccaagcactacagcgtccgtcccctcattgtggcactggtccttcgctccatctactacctgggcattgggcccacgctcaacatcctgggtgctctcaatctgaccaacaagatcgtgtttgtggtgagctttgtgggcaaccgcggcaccttcatccgtggctataaagcaatggtcatggacatggagttcctgtatcacgtgggctacatcctgacgagtgtcctgggcctctttgctcatgagctcttctacagtatcctgctctttgacctcatctaccgagaggagacgctgtttaatgtcatcaagagcgtgacccgcaatggccgctccatcctgctaactgccctgctggccctcatccttgtctacctcttctccatcgtgggcttcctcttcctcaaggatgacttcatcctggaggtggaccggctgcctgggaaccactccagagccagcaccctggggatgccacacggagctgccacatttatgggcacatgtagtggggacaagatggactgtgtctctgaggtctcggtgcctgagatcctagaagaggacgaggagctggacagcacagagcgggcctgtgatactctgcttatgtgtattgtcaccgtcatgaaccacggactgaggaacggtggcggcgtgggcgacatcctccgcaagccctccaaagacgagtcgctcttcccagccagggtggtgtacgacctcctgttcttcttcattgtcatcattattgtcctgaacctcatctttggggtgatcatcgacaccttcgccgacctgcgcagcgagaagcagaagaaagaggaaatcctcaagaccacgtgcttcatctgtggtctggagagggacaagtttgacaacaagacagtgtcctttgaagagcacatcaaactggagcacaacatgtggaactacctgtacttcattgtgctggtccgtgtcaagaacaagacagactacacgggccccgagagctacgtggctcagatgatcaagaacaagaacctggactggttcccacggatgcgcgccatgtccttggtgagcggcgagggcgagggcgagcagaacgagatccgcatcctgcaggagaagcttggctccaccatgaagctggtctcgcacctcaccgcccagctcaatgagctcaaggaacagatgacggagcagcggaagcggaggcaacgtctgggcttcgtggacgtgcagaactgcatgagccgctgagcagagcggagcctcggaggcccccacgggaggccggcttgcccacagctgccgcccttccttcaggtcaggtagaagccaggtgcctgccccatcttcagctcagctgccaccctccctccccaagccaggctctggccagcgggagtgccagagcagagcacggtcctgcttagtaagtacccttgaagagactcggtttaccttagtgccttaggggatgcaagttctccagactgctgtccttcgaagcagtgactggcatttctcagtggccctggcaggtggttaaaagtgggctggctctcacctccaagcactacattgtggctgtcccctgcctgccaccctggctaggaaggtggtagcctgctgttattagcttcctagggctttgatatttaacttattctgggggccatcccaacctcctgtggcctgctggggacagtgtggccccgtcccaggagcctcatgactcaggtggaccttgctcccaggactttctctaggctttgtaggcaagcctcacaagcccagcaacaggcctgggctgtgtgacagtggcttctctctttttggtgtaatgttttacatgtcctgtgtcctggagactaatgtgttaattgccttaaataaattaatagactccaaaaaaa

SEQ ID NO: 893 - DNA, 2928 bp, Rattus norvegicus
  Genbank Accession No. NM_013143
gaggttctgccaaacgcagttcacttgcaacaatgctgtggacactacctgtgtgtcttctctcactgagtttttctgcccacattgcagctgtgtccattcagcatctttcgactggacatgaccacgatgatgtagacgttggtgaacaacagaaggacatttcagaaatcaactcagctgcaggcctgaacctttttcaaggggacatccttctgcccagaaccagaaatgccctgagagatccgtcaagcagatggaagccccccattccatacattctggctgacaatctggatctgaacgccaaaggagccatcctcaatgcctttgagatgttccgcctcaagtcttgtgtggacttcaagccctatgagggggagagctcgtacatcatcttccagcagttttctgggtgctggtctatggtcggtgatcaacacgtgggacagaatatttccattggtgagggctgcgactataaggccatcattgaacatgagatcctgcatgctctgggattcttccatgagcagtcaaggactgaccgggatgattatgtgaacatctggtggaatgaaattatgacagattatgaacataatttcaacacgtatgatgacaagaccatcacagacctcaacacaccctatgattatgagtccttgatgcactatgggccattttcatttaacaagaatgaaaccatcccgaccatcactaccaagatccctgagttcaacgccatcattggacagcgcctggatttcagtgccactgatttaacgagactgaatcggatgtacaactgcaccagaacacataccctgctggaccactgtgcgtttgagaagaccaacatctgtggaatgatccaggggaccagagatgatgctgactgggttcatgaggacagcagtcagcctggacaagtggatcacaccttggtgggacggtgcaaagctgctggctacttcatgtacttcaataccagctcgggggtgaccggagaggtagcccttctggagtctcggatcctttaccccaagaggaagcagcagtgtttgcagtttttttataagatgacaggaagcccttcagacagactcctcatctgggtgagaagggacgacaacacgggcaacgtgcgccagctggccaagatccagacttttcaaggagattctgatcacaactggaaaattgctcacgtgacactcaacgaagagaagaaatttcgctatgttttccagggtaccaaaggtgaccctggtaactcagatggcggtatttaccttgatgacatcactctgacagaaaccccctgccctacaggggtttggaccatccggaatatctcccaggtccttgagaacacagtgaaaggggacaggctcgtgagccctaggttctacaattccgagggttatggttttggggtgaccttgtaccccaatggtagaatcaccagtaactctggctacctgggactcgctttccacttgtacagtggggataacgatgtgattctggagtggccagtggagaacgagcaggccataatgaccatcctggaccaggaacctgatgccaggaacaggatgtccttgagtttgatgttcactacctccaagtaccaaacatcttcagctataaatggctctgtcatctgggacaggccaaccaaggttggagtctatgataaggactgtgattgttttagaagcattgactggggttggggtcaggccatttcccaccagatgctgatgagaagaaatttccttaaagatgacaccctcatcatcttcgtggactttaaagaccttacccacttgaggcagactgaagtccccatttccagcagaagcgtgataccccgaggactccttctgcaaggccaggagcctcttgccttgggagactccagaatagccatgatggaggaatccctgccaagaaggctggaccagagacagcccagcagaccaaagcgctcagtggaaaatactggtcccatggaggaccacaactggccacagtacttcagagacccatgtgacccaaacccttgccagaatgaaggcacctgtgtgaacgtaaagggaatggccagctgcaggtgcgtctctgggcatgcctttttctacacaggggagcgctgtcaggctatgcatgtgcacggaagcttgctgggcctgctcattggctgcatcactgctttgatcttcttgaccttcatcacattctccaacacttaccaaaagctgaggcagtgagctgatgtccactagactgcagaagggcctccttcacctagactttccttccagtagtcagtataatttggggatattcttcatcaaacatgtttgaaagagcctccaaaaccaaagccccaaacctcatgtggggctcttgccactccatttctgtacagttctgctatccttctatgagtttctggtgaatccattatgtcctaagataacagtcattgcattttactataaacactttgcttgcttgaccttctccccttaaatcaccaagtctagttgggtaggagcatgttatcctctgctaccacattgaccccagtgctagaagcataccttactggtgtattgtgggtactcagtaagcattaaatgaatgaaccaataagcaagtgaatagctgtggtataataagtctttttttcttcctcatattgtaaaacatatgattaagtctatttgcaggtgtatcagaaccaaatacccagtttacactagatgggaaaactactgtcttattgctcatgtagtttcttgtgaaatgatttcacagattcctctggtcagctgagtttccatggcatgtacttttttcttgttctgattttaaggaaaaggcttaataaaaccattaaatatgaaaaaaaaa

SEQ ID NO: 894 - DNA, 1500 bp, Rattus norvegicus
  Genbank Accession No. NM_013144
cgccgagcacaaacccagcgagcattgaacactgcacacggccatctgcccagagagctgtgaccaccacttccgctactatctactcagaaagtcgtgactactgagccactgctgcctgcccagattctcatccaccgcctgctgcgtctggttgcgatgccggagttcctaactgttgtttcttggccgttcctgatcctcctgtccttccaggttcgcgtagtcgctggagccccccagccatggcactgtgctccctgcactgctgagaggctggagctctgtccacccgtgcctgcttcgtgccccgagatttctcggcctgcgggctgtggctgctgcccgacatgtgccttgccactgggtgctgcctgtggtgtggccactgcgcgctgcgctcagggactcagctgccgtgcgctgccaggggagcctcgacctctgcatgccctcacccgtggccagggagcctgtgtactagaacctgccgcacccgccacgagcagcttgtccggttctcagcatgaagaggcaaaggctgctgtggcctctgaggatgagcttgccgagagcccagagatgacagaggaacagctgctggatagcttccacctcatggccccatcccgtgaggaccagcccatcctgtggaatgccattagcacctacagcagcatgcgggcccgggagatcactgacctcaagaaatggaaggagccctgccaacgggaactctataaagtgttagagagattagctgccgctcaacagaaagcaggagatgagatctacaaattttatctgccaaactgcaacaagaatggattttatcacagcaaacagtgcgagacatctctggatggagaagctgggctctgctggtgtgtctacccatggagtgggaagaagatccctggatctctggagaccagaggggaccccaactgccaccagtattttaatgtgcaaaactgaaagttgtttcctccctccttcttcacacaaaatatttaagtatatagtgtatttatactccggagcacaccattttatatatgtgtatatgtatatatccaggaactagtttttatactccacatgctgcttgatgtacaagtgggtttgtatttattcactctaagtttatttttttctaccctgtccttgtgctgtattaatttatataactgaagcttttctcatctccatacatgtaaatactaccatctcagctcttccagagttctgctttgaaagggcagcgcggtagtgcctagaacgagcacaagtcagtctgaggtaggggcctttcagtgggttcagggaggaaggttagccctggctcggggagacttcctcatcgaatcccacaggtctgtgtctgatgcctattggctgggaaggttccgatgttggttgtgtaatcaaagctaaacgtggaaagctgcgtcccatgcactgttaaacacacgtctggaataaaacattctacctgga

SEQ ID NO: 895 - DNA, 5541 bp, Rattus norvegicus
  Genbank Accession No. NM_013146
ctgcaagagcaagatatttgtgcggaatgatcatgggtggggccaagagaaatttaagaaagcttttaattctcgatgtgttgtcctgggtaactagggaagatgctggagagaccaggattgcacttttctgtgacaggggatggaaatcagatcgcagaatttgtctcaggatgctccatggacaggaaatggtgatgctagagtcctggtgagaagtctccactcagcactggaggctcaggcctttcttcatcctcgggcctggagacagcgatcagtcttggttagatcaatgatattgtccctagtgattccatgcgcctcacatagttttgcaaacttttccttgatgtctgaactcagatcctttgttctgccgtagagcaccatcagctggaaggtttccccgttcttgaaattaatgagatgaaacatgacatatctgtcatagtctgtcttaagtatagtaaatgtattccctccgtcatactcaacaaaatattcggaattccgactggcttgttttattgaggggggacatgggtaagaacaagtaagacagttgagacccaagtgttaacacaaagggaagactggcgcatcctgctcagcgcatttcggcaacagataatatggcccgtgtgctggcccagcccatgctctgacctccaggcgccaggtcccctacctcagtcactcctacccagaccagctgcggacatgcttagcagatccgggtcccagggaaggcgctgcctggccacactctctcaaattgcctatcagaggaatgatgatgacgaagaagaggctgccagggaacggcgccgccgagcccgacaggaaaggctgcggcagaagcaagaggaagaatccttgggacaggtgacagaccaagtggaggcccatgtccagaacagtgcccccgatgaagagtctaagccagccactgcaaatgctcaggtagaaggtgatgaggaggctgctttgctggagcgcctggccaggcgagaagagagacgtcaaaaacgccttcaggaagccttagagcgtcagaaggagtttgatccaaccataaccgatggcagtctctcagtcccaagcagaaggatgcaaaataactcggctgaaaatgagacagcagagggggaagaaaaaggagagagtcgctcaggacggtatgagatggaagaaacagaagtggtcatcacgtcctaccagaagaacagctatcaggatgctgaagacaaaaagaaagaagaaaaggaggaggaggaggaggaagagaagctgaagggagggaaccttggcgaaaatcagatcaaagatgagaagattaaaaaggacaaagagcccaaagaagaagtcaagaacttcttggatcgaaagaaaggatttacagaagtgaaggcgcagaatggagaattcatgacccacaaacttaaacaaactgagaatgctttcagccccagccgttcaggaggccgggccagcggggacaaggaagctgaaggcgccccacaagtggaagccggtaagaggctggaggagctgcgccgacgccgtggggagacagagagcgaagagttcgaaaaactcaaacaaaagcaacaggaggcagccttggagctggaagagctgaagaaaaagagggaagagagaaggaaggttctggaggaagaggagcagagaaggaagcaggaggaggctgatcgaaaagctagagaggaggaagagaagaggaggttgaaggaagagatcgaaaggagaagggcagaagctgctgagaaacgccagaagatgccggaagatggcctatctgaggacaagaagccgttcaagtgcttcactcctaaaggctcatctctcaagatagaggagcgagcagagtttttgaataagtctgtgcagaaaagtggtgtcaaatcaactcatcaagcagctgtggtctccaagattgacagccggctggagcaatataccaatgcaatcgagggaacaaaagcttcaaaacctatgaagcctgcagcatccgatcttcctgtccctgcggaaggtgtccgcaatatcaagagcatgtgggagaaagggagtgtgttttcatccccctctgcctcggggacaccaaataaggaaactgctggcctgaaggtgggggtttccagccgcatcaatgaatggctaactaaatcgccggacggcaacaagtcacccgctcccaagccttctgacttaaggccaggagatgtatctggcaagcggaacctctgggaaaagcaatccgtggataaggtcacttctcccactaaggtctgaaacaatcggagaaagaacccaactgcaagccatcttgctgggccagctcagttggagagggctaatcgctctgtttatatttatgttttccaatatcccagtaaattcatgtatatgctcactatatttaataaccacaagtagaggtgttcatggtcaaagtgctgcctttgcagaggagcctgtttctaaagaaacccatgctgtgaagtaagcttgctactgtcatatgaacagtgataccaaccacatcagaagtcgacaaaagaaaatcgagcttaagattgtccaaggaatgtatgcggtatctaggtggggggaaatgacccataggctttgttttgtctcagtacagacatcatgtttctgcactttagactaaagcatggaagaaattatctaagtaggcaatcaaaattctctgaaagtgatccacttcagatctgatatagggcagtgatgattgtctttttttttaaaaaagaagatgtactgttgacatattgcttttcttctatgctgattcatacctagattgggtgattattttagctgacagtggtactgatttttttcttcaggttagttgctttgtggatttctctggtagcgatagtagactgaaccacatttagatataacccaactatgtaatgtatgtgcatacgtgtatacagacacactaatggtagatgactctttcatgctggcgctattctatttcatagtacgcccttgtaactaaccaatatcacagctttcaaagattaaagaaaatcacaatagtatatcaatatttcatatttgccagtagaaacatggaagttaggtatagatatgttttcaatgcccaatgacttataagaaaaaagtattggaaaaataagagattacaagtgtcaaaactagttgaaacttcttataagacatagtatttagtttataattgagagcagtcttgaattccagtgtgaattttattaagtctaccatctggacaaagcccaaaccctgtttatttgtggccgtgaagttcacctcctccacacacaaaaaaagttgacctacatgatacctaaggtgtctcctttctctacgaattccggaattccggaattccccaactgcactgtctccacacagctttccttcccactggttacaagcaaattggacaacaaaatctcatgagatatttgtgatttaattttagtcacaaaacatcttcaaaatgacgaggattttgacagcatgcaaagtggtgaagacactgaagagtggctttggtttggccaatgtgacttcgaagcgacagtgggacttctctagacctggcatcaggctcctttctgtgaaggcacagacagcacacattgttctggaagatggaactaagatgaagggctactcctttggccatccctcctcggttgctggcgaagtggtttttaatactggcttaggagggtactcggaagcacttactgatcctgcctacaaggggcagatcctcaccatggccaaccctatcattgggaatggtggggcccctgatacaacggcacgtgatgaactgggactgaataagtacatggagtctgatggaatcaaggtggcgggtctgctggtgctgaattacagtcatgactacaaccactggctggccaccaagagtctgggcagtggctgcaggaggagaaggtccctgcaatttatggagtgggtacaagaatgctgactaaaataattcgggataagggtaccatgcttgggaagattgagtttgaggccagtctgtggactttgtggatcctaataagcagaatttgattgccgaggtttcaaccaaggatgtcaaggtgtttggcaaaggaaaccccacgaaagtggtagccgtggactgtgggataaaaaacaatgtcatccgcctgctagttaagcgaggagcggaagtgcatttggtcccctggaatcatgacttcacccagatggactatgacggacttctgatcgctggaggacctgggaacccagctctgcacagccactaattcagaacgtgaagaagattttggagagtgaccgcaaagagccgttgtttggaatcagtacaggaaacataataacaggattggctcgtggcgccaaatcctacaagatgtccatggccaacagaggacagaaccaacctgttttgaatatcacaaacagacaggctttcataactgctcagaatcatggctatgctctggacaacaccctccctgctggctggaaaccactgtttgtcaatgtcaatgaccaaacaaatgaggtacacgctctcaacaatccattcaggtggaagtaagaagttatggcttttcatagtctgttttatacttctttcccatgtctatgtggtgtgcatgtgcatatgtgccacacactcgtgtgtgtgcatgtgcatgtctattgtgtaggtgtgtgcacccatgtgtgtccatggggagcccggagcaggacacccggtttcttcctggattgttcttcacttaattgtcgtatacatggccactcgttgaactgaacctttggcttggctggctggtcaataaataagctctcaggaagcgttcagctccattccttaaccctgaggttatagcacatgcactgaccagctccattccttaacgctgaggttataaacgcatgcactgaccagctccattccttaacgctgaggttataaacgcatgcactgaccagctccattccttaaccctgaggttatagcgcatgcactgaccacgtccattccttaacgctgaggttataaacgcatgcactgaccagctccattccttaaccctgaggttatagcgaatgcactgaccagctccattccttaacgctgaggttatagcgcatgcactgaccagctccattccttaaccctgaggttatagcgcatgcactgaccagctccattccttaaccctgaggttatagcgcatgcactgaccagctccattccttaacgctgaggttataaacgcatgcactggcatgcttagcttctcacacaggtgataggaacttggcctcagatccttgcctgtaggtcaagtgctctaagccatggaacgatctccccagacagcctgtcactttaaaaaagtaattgctctcttcctttctaattagtcgacttgttaagggccagcacttgcacctccg

SEQ ID NO: 896 - DNA, 1200 bp, Rattus norvegicus
  Genbank Accession No. NM_013154
catgagcgccgctcttttcagcctagacagcccagcacgcggcgcaccctggcccacagagcccgcggccttctacgagccaggcagggtgggcaagccaggacgagggccggagcctggggatctgggggagccgggctccacgacccctgccatgtatgacgacgagagcgccatcgacttcagcgcctacattgattccatggctgccgtgcccaccctagagttgtgccacgacgagatcttcgccgacctcttcaacagcaatcacaaagcggccggcgcgggcagcctggagctgctgcagggcggccctacgcgacccccgggtgtggggtcaatcgccaggggcccgctgaagcgcgaacccgactggggcgacggcgacgcgccgggctccctgctgccggcgcaagtggcagtgtgcgcgcagacagtggtgagcttggcggccgcggcacagcccacaccacccacttcgcccgagcctcctcgaggcagccctggaccgagccttgcgcctggccccgtccgagagaagggcgccggcaagaggggtccggaccggggcagccctgagtaccggcagcgacgcgagcgcaacaacatcgctgtgcgcaagagccgggacaaggccaagcgccgcaaccaggagatgcagcagaagctggtggagctgtcggccgagaacgagaagctgcatcagcgtgtggagcagctcacccgggacctggccagcctccggcagttcttcaaagagctgcccagcccgcctttcctgccgcccaccggcaccgactgccggtaacgcgcggtgtgggccttagagactccgaacgaccgatacctcagaccccgacggcggggagcagacgccgcccgaattgctacagtttcttgggcactggactgcgagagaagctatatgaatcccccttaaattatttttttataatggtagcgttttctacgtcttattaccattgcagctaaggtacattgtagaaaagacttttccgacagacttttgtagataagaggaagagactgcgcatgctttttatattcatttttacagtatttgtaagaataaagaagcatttaaattgcaaaaaaaaagaggcaccagctctgactggcctctttctaggctacggtgatcctgagcatcttttgttacctgctggtagaaatgatcct

SEQ ID NO: 897 - DNA, 1386 bp, Rattus norvegicus
  Genbank Accession No. NM_013156
aattccgcggcgacctccggggatccgagtttgcagactacgtgtgtgcgcagctagccacctcaggtgtttgaaccatgacccctttactcctcctggctgtcctctgcttgggaacagccttagccactccaaaatttgatcaaacgtttaatgcacagtggcaccagtggaagtccacacacagaagactgtatggcacgaatgaggaagagtggaggagagcagtgtgggagaagaacatgaggatgatccagctacacaatggggagtacagcaacgggaagcacggctttaccatggagatgaacgccttcggtgacatgaccaatgaggaattcaggcagatagtgaatggctatcgccaccagaagcacaagaagggaaggttatttcaggaacctctgatgctgcagatccccaagactgtggactggagagaaaagggttgtgtgactcctgtgaagaatcagggccagtgtggttcttgctgggcttttagcgcatcgggttgcctagaaggacagatgttccttaagactggcaaactgatctcactgagtgaacagaaccttgtggactgttctcacgatcaaggcaatcagggctgtaatggaggcctgatggattttgctttccagtacattaaggaaaatggaggtctggactcagaggagtcttatccctatgaagcaaaggatggatcttgtaaatacagagctgagtatgctgtggctaacgacacagggtttgtggatatccctcagcaagagaaagccctcatgaagcctgtagcgacggtggggcctatttctgttgccatggatgcaagccatccgtctctccagttctatagttcaggtatctactatgaacccaactgtagcagcaaggacctcgaccatggggttctggtggttggctatggttatgaaggaacagattcaaataaggataaatactggcttgtcaaaaacagctggggtaaagaatggggtatggatggctacatcaaaatagccaaagaccggaacaaccactgcggacttgccaccgcagccagctatcctatcgtgaattgatggacagcgataataaggactgacggacactacatccgaaggagttcatcttaaaactgaccaaacccgtctctgagtgagaccatggtacttgaatcgttcaggatccaagtcacgatttaaattctgttgacatttttacatgggttaaatgttaccactacttaaaactcctgttataaacagctttataatattggacacttaatgcttaattctgattctggaatatttgttttataaaagttgtataaaactttctttaccttttaaaaataaattttagctcagtgcaaaaaaaaaa

SEQ ID NO: 898 - DNA, 922 bp, Rattus norvegicus
  Genbank Accession No. NM_013160
atggagcgggtgaagatgatcaacgtgcagcccatgctggaggccgcggagtttttggagcgcagggagcgagagtgtgaacatggctacgcttcatcattcccctccatgccgagcccccggctacagcactcaaagcccccacggaggttgagccgggcacagaaacacagcagtgggagcagcaacaccagcactgccaacagatctacacacaatgagttggaaaagaatcgacgagctcacctgcgcctgtgtttagaacgcttaaaagttctgattccgctgggcccagactgcaccaggcacacaacacttggtttgctcaacaaagccaaagcacacatcaagaaacttgaagaagccgaaaggaagagccagcaccagcttgagaacttggaacgagaacagagatttttaaagcggcgactggaacagctgcagggtcctcaggagatggagcgaatacgaatggacagcattggatcaacgatctcctcagatcgctcggattcagagcgagaggagattgaagtggatgtggaaagcacagagttctcccatggagaagtggacaacatcagtaccaccagcatcagcgacatcgatgaccacagcagcctgcagagtattgggagtgacgagggctactccagtgccagtgtcaaactctccttcacgtcctagaacccagcatgacataacagtgcagggcgaagtgctcactggccagttcaataccgtctctcaaattgggttcatgacgcagtctcctctttaaaactaaaaactatacttgaacaaaaggtcagaagacctgtatttaagcaaatacttaaaaagtggggtagagcctccccggtagaacaaatactcctgtatttggaaagatacagtttctaacagcagcaaaaaaaaaaaa

SEQ ID NO: 899 - DNA, 2290 bp, Rattus norvegicus
  Genbank Accession No. NM_013183
gagcttgcaactttgaaagccacagtatggatgcccggcattggccctggtttctggtttttgccacatttctcctggtttctggcttgccagctccagaaaagtttgtcaaagacatagatgggggaatcgatcaagacatattcgatatcaatgaagatttaggactggaccttttcgagggagacatcaaactggaggcaagtgggaggaattccatcattggagacaactacagatggccacataccattccatatgttctagaagacagcttggaaatgaatgctaaaggagtaatcctcaatgcgttcgagcgctatcgccttaaaacgtgcattgacttcaagccctggtctggagaagagaactatatatcagtgttcaagggcagtgggtgctggtcttcagtgggaaacattcacgctgggaagcaagagttgtccatcgggacaaactgtgacagaatagcaacagttcaacatgagttcctccacgccctgggattctggcacgagcagtcgcgtgctgaccgagatgattacatcactatagtttgggacaggatcttgtccggcaaggaacacaatttcaacatctacaacgacagtgtgtctgattccctgaatgtcccatacgactacacctcggtaatgcactacagcaaaaccgctttccagaatgggacagagtctaccatcattacgaaaatctcagactttgaggatgtgattggccaacgaatggacttcagtgactatgaccttctgaagctgaaccagctgtacagctgcacttcttccttgagttttatggactcctgcgattttgagctggagaatatctgtggcatgatccaaagttcacaagatagcgctgactggcagcggctttcacaggttctcagtggtccggagaatgaccactccaacatgggccagtgcaaagactctggcttctttatgcacttcaacactagcactgggaatggggggatcacagcgatgctggagagcagagtgctgtaccccaagagagggtttcagtgcgtggagttttatctgtataacagtggaagtggaaatggccaactgaacgtctacacccgggagtacactgcaggccaccaggatggcgttttgacccttcagagagaaataagagacatacccactgggagctggcagctttactatgtaacactgcaagtgactgaaaaattccgagtggtgtttgaaggcgtcggaggccctggcgcatcatcgggtggtctgtctatcgatgacatcaatctctcggaaacaaggtgtccccaccacatctggcacatacagaatttcactcagcttcttggaggccagaccactgtatacagtcctccattttattcctctaaaggttacgcttttcagattaacctggatctaacatccccgaccaatgtagggctttatttccacctgatctccggggccaatgacgatcaattacagtggccgtgtccttggcagcaagccacaatgacactcttggatcagaatcctgacatccggcagcgtatgtccaaccagcggagtataaccacagacccaaagatgaccgatgataatggaagctatctttgggacaggccttccaaggtgggagtggaggcttttttccctaatggaactcagtttagcagaggcagaggctatggaaccagtgtcttcataacccaagagaggctgaagagcagagagttcttaaaaggagatgacgtttacatcttactgacggttgaagatatatctcacctcaattctacagcggctgtcccagggccagtccccaccacctcgactgtccataatgcctgctctgaggtcgaatgtcagaacggcggcatctgcactctccaagaaggcagagctgagtgcaagtgtcctgcaggagaagactggtggtacatgggcaaaaggtgtgagaagagagggtccaccaaggacacgattgtcattgctgtgtcttccacggtcaccgtgtttgccgtgatgctgatcatcacccttatcagcgtctactgcacccggaggaaatatcgtaagaaggctagtgcaaagacagcagccatgaatctagaaaaccaacatgcgttttgaatattaactcgtgccagcaggtgaaacaaaaagaaaccttctgtcgtcgtagaagaatatttcgcccaggctgtgcgacgacattcacagcatttcaaaccagaccatctctgtaaatagctgagtgcctaataaaccattattttggt

SEQ ID NO: 900 - DNA, 6060 bp, Rattus norvegicus
  Genbank Accession No. NM_013194
tcctggctataagtcaccatggcccagcaggctgcagacaagtacctctatgtggataaaaacttcatcaataacccgctggcccaggccgactgcggtgccaagaagctggtatgggtgccttccaccaagaatggctttgaaccagccagccttaaggaggaggtgggagaagaggccattgtggagctggtggagaatgggaagaaggtgaaggtgaacaaggatgatatccagaagatgaacccacccaagttctccaaggtggaggacatggcagagctcacgtgcctcaacgaagcctcggtgctgcacaacctcaaggagcgatactactcagggctcatctatacctattcaggcctgttctgtgtggtcattaatccttataagaacctgcctatctactcagaggagatcgtggacatgtacaagggcaagaagaggcacgagatgccgccccacatctatgccatcacagacactgcctacaggagcatgatgcaggaccgagaagatcagtccatcctttgcacgggtgagtctggagcaggcaagacagagaacaccaagaaagtcattcagtacctggcacatgtggcctcctcacacaagagcaagaaggaccagggggagctggagcgccaactgctgcaggccaaccctatcctagaggcctttggaaacgccaagacggtgaagaatgacaactcttcacgatttggtaaattcattcgtatcaactttgatgtcaacggctacatcgttggggccaacattgagacttatcttctggagaaatctcgtgctatccgccaagccaaggaggaaagaaccttccacattttttactacctgctgtctggggccggagagcacctgaagactgatctcctgttggagccatacaataaataccgcttcctgtccaacgggcatgtcaccatcccagggcagcaggacaaggacatgttccaggagacaatggaggccatgaggattatgggtatcccagaggatgagcagatgggcttgctgcgggtcatctctggcgtccttcagcttggcaacattgtcttcaagaaggaacggaacactgaccaggcgtccatgccagataacacagctgctcaaaaggtgtcccacctcctggggatcaatgtgaccgacttcaccagaggcatccttaccccgcgcatcaaggtgggcagagactatgtgcagaaggcacagactaaagagcaggctgactttgccatcgaggctttggccaaggctacctacgagcggatgttccgctggctggtgcttcgcattaacaaagctctggacaagaccaagaggcagggcgcctcatttatcgggatcctggacatcgctggcttcgagatctttgatctgaactccttcgagcaactttgcatcaactataccaacgagaagctgcagcagctgttcaaccacaccatgttcatcctggagcaggaggagtaccagcgagagggcatcgagtggaacttcatcgactttggccttgacctgcagccttgcatcgacctcattgagaagccggcgggtcccccaggcatcctggccctgttagatgaggaatgttggttccctaaagccactgacaagagcttcgtggagaaggtggtgcaggagcagggcacccaccccaagttccagaagcccaagcaactgaaggacaaggctgatttctgcatcatccactatgcaggcaaggtggactataaggccgatgagtggctgatgaagaacatggaccctctgaacgacaacattgccaccctgcttcaccagtcctcagacaagtttgtctctgagctgtggaaggatgtggatcgaatcattggcttggaccaggtggctggaatgtctgagacagcgctacccggtgccttcaagactcggaagggcatgttccgtactgtggggcagctgtacaaggagcagctggccaagctcatggccacactgaggaataccaaccccaactttgtctgctgcatcattcccaaccacgagaagaaggccggcaaactggacccacacctggtgctggaccagttacgctgcaatggcgtccttgaaggcatccgaatctgccgccagggctttcccaacagagtggtcttccaggagttccggcagaggtatgagatcctcacacctaactccattccgaagggcttcatggatgggaagcaggcgtgtgtgctcatgatcaaagccttggagcttgacagcaacctgtaccgcatcggccagagcaaagtgttcttccgttccggagtcctagctcacctggaggaagagcgggacctgaagatcactgatgtcatcattggcttccaggcctgctgcagaggctacctggccaggaaggcctttgccaagaggcagcagcagctgactgccatgaaggtcctacagaggaactgtgctgcatacctcagactccggaactggcagtggtggaggctcttcaccaaggtcaagcccctgctgaactcaataaggcatgaggatgagcttttagccaaggaggcggaactgacaaaagttcgagagaagcatctggctgcagagaacaggctgacagagatggagactatgcagtctcagctcatggcagagaagttgcagcttcaggagcagctgcaggcgaaaaccgagttgtgtgctgaggctgaggagctccgggcccgcctgacagcgaagaagcaggagttggaggagatctgccatgacctggaggccagggtagaggaggaggaggagcgctgccagtatctgcaggcagagaagaagaagatgcagcagaacatccaggaactcgaggagcagctggaggaggaggagagtgcccggcagaagctgcagcttgagaaggtgaccactgaggccaagctgaagaaactggaggaggaccagatcatcatggaggatcaaaactgcaaactggccaaggagaagaagctgctggaagacagagtagctgaatttactacagacctcatggaagaggaggagaagtccaagagcctggccaagctcaagaacaagcatgaggcgatgatcaccgacctggaagagcgccttcgtagggaggagaagcaaaggcaggagttggagaagacccgccgcaagctagagggagactccacagacctcagcgaccagattgctgagctccaggcgcagatcgcagagctcaagatgcagctggccaagaaggaggaggaattgcaggctgccttggccagagtggaagaagaagctgctcagaagaacatggccctgaagaagattcgagaactggaaactcagatctctgagctgcaggaagacctggagtcggagcgtgcctgcaggaacaaagctgagaagcagaaacgggatcttggagaagagctagaggctctgaagacagagctggaggacactctggactccaccgctgcccagcaggaactgaggtcaaagcgtgagcaggaagtgagcatcctgaagaagactcttgaggatgaggccaagacccatgaggcccagatccaggagatgaggcagaagcactcgcaggccgtggaggagctggccgagcaattggagcagactaagcgggtaaaagctacccttgagaaggctaagcagaccctggagaatgagcggggagagctggccaatgaggtgaaggccttgctgcagggcaagggcgactcggagcacaagcgcaagaaggtggaggcgcagctgcaagaactgcaggtcaagttcagcgagggagagcgtgtacggaccgagctggctgacaaggtctccaagctgcaggttgaactggacagcgtgaccggtctccttaaccagtcggacagcaagtccagcaagcttacaaaggacttctctgcgctggagtcccagctccaggacacacaggagctgctccaggaggagaaccggcagaagctgagcctcagcaccaagctcaagcagatggaggatgagaaaaactccttcagagagcagctggaggaggaagaggaggaggccaagcgcaacctggagaagcagatcgccaccctccatgcccaggtgactgatatgaagaagaagatggaggacggtgtagggtgcctggagacagcagaggaggcaaagcggaggcttcagaaggacctggaaggcctgagccagcggcttgaggagaaggtggctgcctatgataagctggagaagaccaagacccggcttcagcaggagctggatgacctgctggtggacctggaccaccagcggcagagcgtctccaacctggaaaagaagcagaagaagtttgaccagctcctagctgaggagaagaccatctcagccaagtatgctgaggagcgagaccgagctgaagctgaggcccgtgagaaggagacaaaggcactgtcactggcccgagcacttgaggaggccatggagcagaaggcagagctagaacggctcaacaagcagttccgcacggagatggaggacctcatgagctccaaggatgacgtgggcaagagtgtccatgagctggagaagtccaacagggcattggagcagcaggtcgaggagatgaagacccagctggaggagctggaggatgagcttcaggccactgaggatgccaagctccgtctggaggtgaacctgcaggccatgaaggcccagtttgagcgggatctgcagggccgggatgaacagagcgaggagaagaagaagcagctggtcagacaggtgcgggagatggaggcggagctggaggatgagaggaagcagcggtccattgccatggctgctcgcaagaaactagagatggatctgaaggacctggaggctcacatagacacagccaacaagaaccgggaggaggccatcaaacagctacggaagcttcaggcccagatgaaggactgcatgcgggacgtggacgacacgcgagcctcccgggaggagatcctggcccaggccaaggagaatgagaagaagctcaagagcatggaggccgagatgattcagctgcaggaggaactggcagccgccgagcgtgctaaacgccaggcccagcaggagcgggatgagctggccgatgagatcgccaacagcagtggcaaaggggccctagcattggaggagaagcggcgactagaggccctcattgccctgctggaggaagagctggaggaggagcagggcaacacagaactgatcaacgaccggctgaagaaggccaatctgcagatcgaccaaataaacaccgacctgaacctggagcgcagccacgcccagaagaacgagaatgcgcggcagcagctggaacgccagaacaaggagctcaaggccaagctgcaggagatggagagtgctgtcaagtccaaatacaaggcctccatcgctgccttggaggccaagattgcacagctggaggagcagctggacaacgagaccaaggagcgccaggcagcctccaagcaggtgcgccgggcggagaagaagctgaaggatgtgctgctgcaagtggaagacgagcggaggaacgcggagcagttcaaggaccaggccgacaaggcatccactcgcctgaagcagcttaagcggcagctagaggaggccgaggaggaggcccagcgggccaatgcctcccgccggaagctgcagcgtgagctggaggatgccacagagactgccgatgctatgaaccgagaggtcagctccctgaagaacaaactgaggcgtggggacatgccatttgttgtgacccgccgaattgtccggaaaggcactggcgactgctcagacgaggaggtcgacggtaaagcagacggggctgatgccaaggcgaccgagtagggacttctgctacccaagacggatggacagacggctccacctcccttccccagccctccacacccctgccttgagactgctctgcccatgcccctcttcctcccaggccttcttgagggcattggcttcctctgctgcatccccttccagctccct

SEQ ID NO: 901 - DNA, 1272 bp, Rattus norvegicus
  Genbank Accession No. NM_013215
gaattcgactgctggaaccaacgtcctctcttaccctccaccttcttctgccacctctaccacggtcaccatgtcgcaagcccggcctgccactgtgctgggtgccatggagatgggtcgccgcatggatgtgacctccagctccgcgtcggtgcgcgccttcctgcagcgcggccacacggagatagacaccgccttcgtgtatgcgaacggtcagtctgagaccatcctaggagacctggggctcggactgggccgcagcggctgcaaagtaaaaattgccaccaaggctgccccaatgtttgggaagacactgaagccagccgatgttcggttccagctggagacgtcactgaagaggctgcagtgtccccgggtggacctcttctatttacactttccagaccacggcactcctatagaggagaccctgcaggcctgccaccagctgcatcaggagggcaagtttgtggagcttggtctgtccaactatgtctcctgggaagtggctgagatttgtaccctctgcaagaaaaatggctggatcatgccaactgtgtaccagggcatgtacaacgccatcaccaggcaggtggagactgagctcttcccctgcctcagacacttcggactaaggttctacgccttcaaccctttggctgggggcctgctgactggcagatataaataccaggataaggatgggaagaatcctgagagccgcttctttgggaatccattttctcaactgtacatggaccgctactggaaggaggaacacttcaatggcatcgccttggtggagaaggctctgaagactacctatggccccactgcccccagtatgatctcagctgccgtacggtggatgtaccatcactcacagctcaagggcacccaaggggatgcagtcattctgggcatgtccagtctggaacaactggagcagaacttggccttggtcgaggaagggcctctggagccagctgttgtggatgcctttgaccaagcctggaacctagttgcccacgagtgtcccaactatttccgctaagatacatctgccttggggatggcgcagcttactgcctgccccgccttgtcctgggctcgatctgatctggttctttcctttttagacaggtcactgtctttttcttccctgctttctatacagccagttgctttcaaagtgagagctggctgagccccaatacctcctgctgaataaaactgttccctgtcacagcctgggctacaactggcggccga

SEQ ID NO: 902 - DNA, 1866 bp, Rattus norvegicus
  Genbank Accession No. NM_016986
agagccaacagagcaggaaggcatcatggcagcagcgctccgcagaggctacaaggtcctgagaagtgtctctcattttgagtgtcgagcacaacacacaaaaccatctctcaagcaggagccgggactagggtttagcttcgagttgacggagcagcagaaagagtttcaaacaattgctcggaagtttgccagagaggaaataatcccggtcgccccagactacgataaaagcggggaatacccgttccctctcatcaagagagcctgggaacttgggttgatcaacacacacattccggagagttgtggtggtcttggcctgggaacttttgatgcgtgtttaattacggaagagttggcatatgggtgtacaggggtgcagactgctattgaagcaaattctttggggcaaatgcctgtgattattgctggaaatgatcaacagaagaagaagtatttggggaggatgacggagcagccgatgatgtgtgcctactgcgtgacagaaccctcagcaggctctgatgtggcgggcattaagaccaaagcagagaagaagggtgatgaatatgtcatcaatggccagaagatgtggataaccaacgggggaaaggccaactggtattttgtattgacgcgatctaacccagatcctaaagtacctgctagtaaagccttcaccggattcatcgtggaggccgacaccccgggaatacacatcggaaaaaaggaactaaacatgggtcagcggtgctctgacaccagaggaatcaccttcgaagatgtcagagtgcctaaggaaaatgtgttaattggtgaaggagcaggtttcaagattgcaatgggggcttttgatagaaccaggccgacggtcgcagctggtgctgtcgggctagcccagagagccctggacgaagctactaagtatgccctggacaggaaaacatttggaaagctgctagtggagcaccaaggagtttcatttctgctcgcagaaatggcgatgaaagttgaactggccagactcagttaccagcgagcagcctgggaggttgactccggccgccggaacacgtactttgcctctattgcgaaggcctttgctggagatattgccaaccagctcgctaccgatgctgtgcagattttcggaggctatggattcaacactgagtacccagtagaaaagctgatgcgggacgccaagatctatcagatttacgaaggtactgcacaaattcagaggctgatcatagctcgtgagcacattgaaaagtataaaaattaacagaaattactatcgaacgatgcttcaccctcatgtaactacgctcagagcactgttgctgcttcagggggaaagggctttacttgtcttcccacagaaatgagataaaagacgcgtgtcacagatctgtgcaatggggtcccacggcggagggtgcctctgttgagttccacagtgaccctttctagataggtttggttttggacagtgagtggtcagtccttggccccgaattgtgttaatttgctccttgatcacttgagatggagaaataccctggagttctaatgctcattcaagtgacaagaaaggtagcctgtcacgaaagaactcaggattctacacagacactgaggaatgtggcggattggacccatcacactgtgaagagagagcatttctgtgctgagctgtttcataattttgattatatttcccttgtattgcagaagagtaaaaaagtttatatgcattttctcccattataaaactaaaaactttctggaaaatcttaattctgaactggcattttatttgtcttgattacaatgattcaataaagctagccttaactt

SEQ ID NO: 903 - DNA, 2009 bp, Rattus norvegicus
  Genbank Accession No. NM_016988
ccggtgatggccggcagacagtctggttggagccaggcggctcttctccagttccttcttggcatgtgcctaatggtgatgccacccatacaagcccggagtctgcgctttgttaccttgctgtatcgacacggagatcggtcaccagtgaaggcatatcctaaggacccctatcaggaagagaaatggccccagggatttggtcagctaaccaaggaagggatgctacagcattgggagctgggccaggccctgcggcaacgctaccatggctttctgaacgcctcttaccacaggcaagaggtttacgtgcgaagcacagactttgaccgtactctcatgagtgcagaggccaacctggccggactcttccctcccactgaagttcagcacttcaacccgaacatttcatggcagcctatccctgtccacaccgtgcccattactgaagacaggttgctgaagtttcctttgggtccatgtccccgttatgagcagttgcagaacgagactcggcagacaccagagtatcagaacatgagtattcagaatgcacaatttctggacatggtggccaatgagacagggcttatgaacttgaccctagagaccatctggaatgtgtatgacacactcttttgtgagcaaacacatgggctgctcctgccaccctgggcctctccccaaaccgtgcaggctctgagccagctaaaggacttcagcttcctcttcctcttcgggatccacgatcaagtacagaaggcccggcttcaggggggagttctgctggctcaaatattgaagaatctgaccctaatggcaactacctctcaattccctaagcttctggtttattctgcgcatgacactaccctggttgctctgcaaatggcactgaatgtctacaatggtaaacaagccccctatgcttcctgccacatatttgaactgtaccaggaagataatgggaatttctcagtcgagatgtactttcggaatgacagtaagaaggcaccctggccactgaccctgcctggctgtcctcaccgttgcccactgcaggacttccttcgcctcacagaacctgtcatacccaaggactggcagaaggagtgccagctagcaagcgatactgcagacacagaggtgattgtggcactggctgtctgtggctccatcctcttccttctaatagtgttgctcctcactgtcctcttccggatgcaggcccagcctcctggctaccaccatgttgcagacagggaagaccatgcttgacaaccactcagtccccttccctctgcctcctaggggatgtgggctgagtccttgctcctgactattgccgatcccagagggacaggtttagccttcctgattacctacgcccaaatgaatgagtgaggctgggctggtcgcacgtcacctgtgacttaccatcctcatgcctgatgtttaccatgtactgtgttggacactggctttctctaaatgggatttgcctcttctatactccctaaggacttgagatacagacaagcattcaggttttactcaagaccttgggattaaaaaaacaaaacaacaacagaaaaaaaaccccaaaccctgaagaagctggtacttgatctgtctagctcttcccccaagccttgctctttgtcttctagcccatatctttggcaaatggcttggagacattgtcccttggtacttttgcagttcatataaatggctcattttatatggatcacccaacagcaaagtttccctctgactgaggcctgccgtcagtgtcaacctcaggcaggttgaaggacactggtgctgcacctggatgacagtgggaggacacaggagtgaaacacatggaatcatgacgtgactctccctcagctgggctggactcttcagggacttgaagtaaatgcagctggtgaactgtacaccttgactgtggcccgaaacagagctgaagtaactccgaggaaatgaaggttttgactgag

SEQ ID NO: 904 - DNA, 4113 bp, Rattus norvegicus
  Genbank Accession No. NM_016996
cgggactctccaggccggctcaggcaccggactgtaggtgtatttggagggatttggaggctggagaccccaggaagcacgcaggcgggagcaggcaaggggcggagccccgggcccggccaaggtggccgtcagagggtctgcggggaggcagtagcttgacccaaggcgaccagggaacttcagacggtagcacgccactcaaacaaattaacttgacatcgcaagctgggcgggctggtacgacatcctgacttcagcatccagctgttcctgggcagacagagggccaacaggtgttcctgtggaagaagccaggacaaggactccagaaaacatctcgggcagcctctacatgatgtcacttctcaggactcgaggaccagccaccctacacctctactacagagaaggcagaaatggagacccaaaggccatcactcctgctctgtcactaaccactctgtaatcatgtctccccaccagaaggtgtgaaccgcaccagggccgtggagttctcgggctcccaatccactgacacctttacctgtcccctgaagagaaggcaacgctatggcatcgtacagctgctgtttggccctattggctcttgcctggcactcctctgcctatgggcctgaccagcgagcccaaaagaagggggacattatcctaggaggtctctttcctatccattttggagtagcagccaaagatcaagatctgaagtcaagaccagagtctgtggagtgcattaggtataacttccgtggattccgatggttacaagccatgatattcgccatagaggagataaacagcagcccctcccttcttcccaacatgacactgggatataggatatttgacacctgtaacaccgtctccaaggcgctggaagccaccttgagttttgttgcccagaacaaaatcgattctttgaacctggacgagttctgcaactgctctgagcacatcccttcgaccattgccgtggtgggagccaccggctccggtgtctccacggcggtagccaacctgctgggacttttctacatcccccaggtgagctacgcctcctccagcaggctcctcagcaataagaaccagtacaaatccttcctccgcaccattcccaatgacgaacaccaggcaaccgcgatggccgacatcatcgagtacttccgctggaactgggtgggcacaattgcagctgatgacgactatggcagacctggcattgagaagttccgagaggaagccgaagagagggatatctgcattgattttagcgagctcatctcccagtactctgacgaggaagagatccagcaggtggtcgaagtgatccaaaactctacggccaaggtcattgtcgttttctccagcggcccggacctagaacctctcatcaaggagattgtgcggcgtaacatcacaggcaggatctggctggctagcgaggcctgggccagttcctcgctgattgctatgcctgagtatttccatgtagtcgggggcaccattgggttcggtctgaaggctgggcagattccaggcttcagagaattcctacagaaagttcatcctaggaagtctgtccacaatggttttgccaaagagttttgggaagaaacttttaattgccacctccaagaaggcgcaaaaggacctttacctgtggacaccttcgtgagaagtcacgaagaaggtggcaacaggttactcaatagctctactgccttccgacccctctgcacaggggatgagaacatcaacagtgtggagaccccttacatggattacgaacatttacggatatcctacaatgtgtacttagccgtctactccattgcgcatgccctacaagatatatacacctgcttacccggaagagggcttttcaccaacgggtcctgtgcagacatcaagaaggttgaggcctggcaggtcttgaagcacctacggcacctgaacttcaccaacaacatgggggagcaggtgaccttcgatgagtgtggtgatctggtggggaactattctatcatcaactggcacctctccccagaggacggctccattgtgttcaaggaagttgggtactacaatgtgtatgccaagaagggagaaagactcttcatcaatgaggagaagatcttgtggagtgggttctccagagaggtgcctttctccaattgcagccgggactgtcaggcagggaccaggaaggggatcatcgagggagagcccacctgctgctttgagtgtgtggagtgtcctgatggagagtacagtggagagacagatgcgagtgcctgtgacaagtgcccggatgacttctggtccaatgagaaccacacttcttgcattgccaaggagattgagtttctggcgtggaccgagccctttggaatcgctctcactctctttgcggtgctgggcattttcctgaccgcctttgtgctgggtgtcttcatcaagttccgaaacacacctatcgtcaaggccaccaaccgagaactgtcctacctcctgctcttctccctactctgctgcttctccagctccttgttcttcattggggagccccaggactggacgtgccgcctgcgacagcctgctttcggcatcagctttgtgctctgtatctcgtgcatcttggtgaagaccaatcgcgtcctcctggtatttgaagccaagatacccaccagcttccaccggaagtggtgggggctcaacctgcagttcctgctggttttcctctgcaccttcatgcagatcctcatctgcatcatctggctctacacggcgcccccctctagctaccgcaaccatgagctggaagacgaaatcatcttcatcacgtgccatgagggctcactcatggcacttggctccctgatcggctatacctgcctgctggctgccatctgcttcttctttgccttcaagtccaggaagttaccagagaacttcaacgaagccaagttcattaccttcagcatgctcatcttcttcatcgtctggatctccttcattccagcctatgccagcacctacggcaagtttgtctctgccgtagaggtgatcgccattttggcagccagctttggcttactagcctgcatcttcttcaacaaggtctacattatcctcttcaagccttcccggaacaccattgaggaagtccgctccagcaccgcagcacatgctttcaaagtagcagcccgcgccactctacgccgtcccaacatctcccggaagcggtccagcagccttggaggctccaccggctccattccctcctcctccatcagcagcaaaagcaacagcgaagaccggttcccgcagccagagaggcagaagcaacagcaaccgctgtccctgacccagcaagaacagcagcagcagcccctgaccctccacccacagcaacagcagcagccacagcagccgagatgcaaacagaaggtcatcttcggcagtggtacggtcaccttctctctgagttttgacgagcctcagaagaatgccatggcccacaggaactccatgcgtcagaactccctggaggcccagaggagcaacgacaccttgggcagacaccaggccctgcttcccctacagtgtgcagatgcggactcagaaatgaccattcaggaaacgggcctgcaagggcccatggtgggggaccaccagccagaaatggaaagctcagatgaaatgtccccagcgctggtcatgtccacctctcggagcttcgtcattagtggtggaggtagctctgtgacggaaaacgtattacactcctaatggagggaaaggctatccagttgagaggtttttcttagagccctgagcaaaaggatgggtccttcctttcttcccaggaagccagggagagtaggtacgtcaaagcctgtactcagttgcactgctttgaatgacagtgaactgactggtgtgctctttagagttaaaagaagagccatgttttggggtcgttttccagagctcagtatcacacctgggtttgctgaagtcttttcctctgctctatccaccatcagttcagacgaaagcaaggctctaagctacccatctgcttccctc

SEQ ID NO: 905 - DNA, 2462 bp, Rattus norvegicus
  Genbank Accession No. NM_016999
gatggctgcaccatgagcgtctctgcactgagctccacccgcttcacgggcagcatctctggcttcctccaagtggcctccgtgcttggtctgcttctgctgctggtcaaagcagtccagttctacctgcaaaggcaatggctactcaaggctttccagcagttcccatcacctcccttccactggttctttgggcacaagcagtttcaaggtgacaaagaactacagcaaattatgacatgtgtggagaatttcccaagtgcctttcctcgatggttctggggaagcaaagcctacttaattgtctatgaccctgactacatgaaggtgattctcgggcgatcagatccaaaggccaatggcgtctacagattgctagctccttggatcggatatggtttgctcttgctgaatggacaaccgtggttccagcaccggcgaatgctaaccccagccttccactatgacattctgaaaccctatgtaaaaaacatggctgactccattcgactgatgctagacaaatgggaacagctggcaggtcaagactcctctatagaaatctttcaacatatctccttaatgaccctagacactgtcatgaagtgtgccttcagccacaatggcagtgttcaggtggatggaaattacaagagctatatccaggccattgggaacttgaatgacctctttcactcccgtgtgaggaacatctttcatcagaatgataccatctataatttttcttccaatggccacttgttcaaccgtgcttgtcaacttgcccatgatcacacagatggtgtgatcaagctaaggaaggatcagctgcagaatgcgggagagctggaaaaggtcaagaagaaaagacgtttggattttctggacatcctcttacttgccagaatggagaatggggacagcttgtctgacaaggacctacgtgctgaggtggacacatttatgttcgagggtcatgacaccacagccagtggagtctcctggatcttctatgctctggccacacaccctaagcaccaacaaagatgcagagaggaagttcagagtgtcctgggggatgggtcctccattacctgggatcacctggaccagattccctacaccaccatgtgtatcaaggaggccctgaggctttacccacctgttccaggcattgtcagagaactcagcacatctgtcaccttccctgatgggcgctctttacccaagggtatccaagtcacactctccatttatggtctccaccacaacccgaaggtgtggccaaacccagaggtgtttgacccttccaggtttgcaccagactctccccgacacagccactcattcctgcccttctcaggaggagcgaggaactgcattgggaaacaatttgctatgagtgagatgaaggtgattgtggccctgaccctgctccgctttgagctactgccagatcccaccaaggtccccatccccttaccacgacttgtgctgaagtccaaaaatgggatctacctgtatctcaagaagctccactaattccgttgtggagctccgaaatctgaaatgagtttcactggcagaaagctgagttggtggtgtgactagccttcttcagaagagtgcttcagagagtcctctcctcctctcttcagtacagatcacccttctcagcactggaatattcctctgctttaaagccagcacccttcccataccccctcttctaaaagccttcccttttacaaatgttcttatgacatcatcaagaccactgaaaaactccaagataatttcccatctcaatattccttactccatctaacctactaagtcccttttgaattatgaggaataattcaatttgttccatgggctccaaaactcaaggcctgagcattattgtgaaacctttattcagcctaatatcatcttcacaagactgttacctggtacgttcatctaaatctcccctgcatagtctctctacctgactattcctcacacaagtttctttaccttccctcctttctccaataaagtgtccagtgtcctgcacaaaaagctcaaggagaactgattatcaccttctgattcgttcattgatgcattcaaattaaacctccacatagtagagactttttcaactattataaaaaccatcctgagccagacctgcagtcaacagcaagagcaggaagcgcataggaactacacctgcaaccaagctggcacaaagaccaagaattctgaagcagcccaaactcaagatgacatatttttacaagttagagaaaaatcaagatctgagttatcttgacaaactcgggatggaaagtaggagggaggggaaagcaaataaatacttccttattgtgtagcataaaaaaaccgaattcgtaggagggaggggaaagcaaataaatacttccttattgtgtagcataaaaaaaccgaat

SEQ ID NO: 906 - DNA, 1396 bp, Rattus norvegicus
  Genbank Accession No. NM_017000
tgggccaatacaatcagggctcttctcaccgccatggctccagaagttgggggcggatcgtagtgtcaagcgctgattggctgagcagagaggacatcattcaactatgccatgaaggaggctgctgtggaggctctgaagaagaaaggatgggaggtggtcgaatctgacctctatgctatgaactttaaccccctcatttccagaaacgacatcacaggggagccgaaggactcggagaactttcagtaccctgttgagtcatctctggcgtataaggaaggccgcctgagcccggatattgtagctgaacagaaaaagctggaagctgcagacctagtgatatttcagttcccattgtattggtttggggtgcccgccattctgaaaggctggtttgagagagtgcttgtagcaggattcgcctacacgtatgccaccatgtatgaccaaggtcctttccagaataagaagaccttgctttccatcaccaccgggggcagcggctccatgtactctctgcagggtgtccacggggacatgaacgtcattctctggccaattcagagtggcattctgcgcttctgtggcttccaggtcttagaacctcaactggtgtacagcattggccacaccccacccgatgcccgcgtgcaggtcctggaagggtggaagaagcgtctggagaccgtctgggaggagtcaccactctactttgctccaagcagcttgtttgacctaaacttccaggcaggattcttactgaaaaaagaggttcaagaggagcagaaaaagaacaagtttggcctttctgtgggccatcatttgggcaagtccattccagccgacaaccagatcaaagctagaaaataaggttttccataccatgtagttagacccaggtttctttttccccagtttgcctggcttgctttcagttttcgcctttgttccacaaggataggaaaaggaggaggctcgcctcatgcgtttttggatagttctgccacggctgtgacagcaaaatgaacgaggtcagattaggggcctcaggtggcctgggatatgaatcagggagaggtgtagccgcgagcggggaaaatactcttctaggtcttttgtacactataagcttttttcttcgggctagccttggctaaatggcatccaatcctccacccacttgttgctattagttacctctctgtggtttagggcaggagggaattgctcaaacaatggctgagggactaacttgtttagcagttagctaaagcctgtttatgatccatcctggtttcaattactgtgcagtgactgacaagcctcgggggattgctctccagctcttctctgccttgtacatagcacacccaggtcctgggaaatgaataca

SEQ ID NO: 907 - DNA, 2324 bp, Rattus norvegicus
  Genbank Accession No. NM_017006
gtgaacgtgtttggcagcggcaactaaattcagaaaacatcatggcagagcaggtggctttgagccggacccaggtgtgtgggatcctgagggaagagttgtaccagggtgatgccttccaccaagctgatacacacatatttatcatcatgggtgcatcgggtgacctggccaagaagaagatttatcctaccatctggtggctgttccgggatggccttctacccgaagacaccttcattgtaggctatgcccgctcacgactcacagtggatgacatccgcaaacagagtgagcccttctttaaagtcactccagaagaaagacccaagctagaggagttctttgcccgtaactcctatgtagctggccagtatgatgatccagcctcctacaagcacctcaacagccacatgaatgccctgcaccagggaatgcaggccaaccgtctgttctacctggccttgccccccactgtctatgaagcagtcaccaagaacattcaagagatctgcatgagtcagacaggctggaaccgcatcatagtggagaagcccttcgggagagacctgcagagctccaatcaactgtcgaaccacatctcctctctgtttcgtgaggaccagatctaccgcattgaccactacctgggcaaagagatggtccagaacctcatggtgctgagatttgccaacaggatctttggacccatctggaatcgagacaacattgcttgtgtgatccttacatttaaagagccctttggtactgagggtcgtgggggctattttgatgaatttgggatcatcagggatgtcatgcagaaccacctcctgcagatgttgtgtctagtggccatggaaaagcctgcctctacagattcagatgatgtccgtgatgagaaggtcaaagtgttaaaatgtatctcagaggtggaaactgacaacgtggtccttggccagtatgtggggaaccccagtggagaaggagaagctaccaatgggtacttagatgaccccacagtaccccatgggtctaccactgctacctttgcagcagctgtcctctatgtggagaatgaacggtgggatggagtacccttcatcctgcgctgtggcaaagctctgaatgagcgcaaagctgaagtgagacttcagttccgcgatgtggcaggtgacatcttccaccagcagtgcaagcgtaacgagctggtcatccgtgtgcagcccaatgaggcggtatacaccaagatgatgaccaagaagcctggcatgttcttcaaccctgaggagtctgagctggacctaacctatggcaacagatacaagaatgtgaagctccctgatgcctatgaacgcctcatcctggatgtcttctgtgggagccaaatgcactttgtccgtagtgatgaactcagggaagcctggcgtatcttcacaccattgctgcacaagattgatcgagagaagccccagcccatcccgtatgtctatggcagccgaggtcccacagaggcagatgagctgatgaagagagtgggcttccagtatgagggtacctacaagtgggtgaaccctcacaagctctgagccctggaaacttacaccatctgcactctgcctcttctggccaccctttctgcatctgcccttctcaccatctaaccctctattaggactattgacctcatattggaaagactttgggaccataggccttagctacacattctagtccctgggcttaggccaccattctgtcctatgctgctgccactgccactaccactaagcccagctacattcctcagataccaggcattcaaaacgcattgcaatgctttcaggaccaccactgtccctatctgagccacccatctttccacaagacctgaatcacctcctcccctcaatcccctgcagaaagaacgcctatcagtctgtccctggactccttaagataggagttaggaacaattgggaggagccttgggccttggagggacaatgaccaaaccacacttccctgagactgtgggcaagctcctcaaaacttaaagtgatcaaggacacccatctgagaggacctgcccatagccacactagccttagtgctacttgacattcctcctcaccagctggaagaactctcatgctgcctagcaatattttgggggccatagatatctcctaaacaattccatagtccatagtcagcctcatccaacccatgggcagcctccttaccaaaggaaggtaagagcagcagctagaattttcctaccccaaccctgccattaaatcctcaaaaaaaaaaaaaaaaaa

SEQ ID NO: 908 - DNA, 2069 bp, Rattus norvegicus
  Genbank Accession No. NM_017023
caatcacacaactccactcgagttagccattgaaagccaatgcaagtaaatgtcattccaaagcttaagattcattaaggtgggcctaaaagaagacagctgctgtgcagacaacgtcgaacaagcaccacttgcttgctttgcccagcatgggcgcttcggaacggagtgtgttcagagtgctgatcagggcactgacagaaaggatgttcaaacacctccgaagatggtttatcactcacatatttgggcgttcccggcaacgggcaaggctggtctctaaagaaggaagatgtaacatcgagtttggcaatgtggatgcacagtcaaggtttatattctttgtggacatctggacaactgtgctggacctgaaatggaggtacaaaatgaccgtgttcatcacagccttcttggggagttggttcctctttggtctcctgtggtatgtcgtagcgtatgttcataaggacctcccagagttctacccgcctgacaaccgcactccttgtgtggagaacattaatggcatgacttcagcctttctgttttctctagagactcaagtgaccataggttacggattcaggtttgtgacagaacagtgcgccactgccattttcctgcttatcttccagtctattcttggagtgatcatcaattccttcatgtgtggtgccattttagccaagatctctagacccaaaaaacgtgctaaaaccattacgttcagcaagaatgcggtgatcagcaagcgtggcgggaagctctgcctcctcatccgagtggccaatcttaggaagagccttctgattggcagccacatatatggcaagcttctaaagacaaccatcactcctgaaggcgagaccatcattttggatcagaccaacatcaactttgtcgtcgacgctggcaatgaaaatttgttcttcatatccccactgacgatctaccacattattgaccacaacagccctttcttccacatggcagcagaaactctttcccaacaggactttgagctggtggtctttttagatggcacagtggaatccaccagtgcaacctgccaggtccgcacgtcatacgtcccagaggaggtgctttggggctaccgtttcgttcctattgtgtccaagaccaaggaagggaaataccgagttgattttcataacttcggtaagacagtggaagtggagacccctcactgtgccatgtgcctctataatgagaaagatgccagggccaggatgaagagaggctatgacaaccctaactttgtcttgtcagaagttgatgaaacggacgacacccagatgtagcagtggcttttccacctacaaaaagcctcccaaggacctaagggttgactgtgttcagaagcatctgacgggggtctgaaagcaggatgagaacatgcgaaatctgctagcacagtcacccctgaaccccagggctatggttctacaagacacatagctctataaggctgcatacggtgcatgcatgtgaatgaaactgtggaagccaaaggggcccacttggatcctcactatgactgtgtaagctcatatcgtgttgatggaaacaaagtcattcaaggacaaaacttaggagctttagaaagcttcaggaactagccacatttcctgtttgattctatggatgagaaagatgccatttttatcttaaagtagacttctatcaatggaaaatctgccctctgcgctgggaagtgagccagccaatcagtgacaataagagactgtcatacaaagaatcagtaaagactctaaccttctcaagctctggtgtttgaagcctttgtctgagtctgggtccatgcttcagaaggggtaaggtgacatccactgactgtacctctctgaacccaaggtacagaagaacaggaagccccaatcaacttcataatcaacccagatgctgcagcccatacagaatttggcctgaatgatttcctgtggagcattaaatggaggccaagtccactctttagatattaaatgaatattcttttgcaaaggaaaaaaaaaaaaaaaaaaaaa

SEQ ID NO: 909 - DNA, 1609 bp, Rattus norvegicus
  Genbank Accession No. NM_017025
gtgtgctggagccactgtcgccgatctcgcgcacgctactgctgctgctcgcccgtcgtcccccatcgtgcactaagcggtcccaaaagattcaaagtccaagatggcagccctcaaggaccagctgattgtgaatcttcttaaggaagaacaggtcccccagaacaagattacagttgttggggttggtgctgttggcatggcttgtgccatcagtatcttaatgaaggacttggctgatgagcttgcccttgttgatgtcatagaagataagctaaagggagagatgatggatcttcagcatggcagccttttccttaagacaccaaaaattgtctccagcaaagattatagtgtgactgcaaactccaagctggtcattatcaccgcgggggcccgtcagcaagagggagagagccggctcaatttggtccagcgaaacgtgaacatcttcaagttcatcattccaaatgttgtgaaatacagtccacagtgcaaactgctcatcgtctcaaacccagtggatatcttgacctacgtggcttggaagatcagcggcttccccaaaaacagagttattggaagtggttgcaatctggattcggctcggttccgttacctgatgggagaaaggctgggagttcatccactgagctgtcacgggtgggtcctgggagagcatggcgactccagtgtgcctgtgtggagtggtgtgaacgtcgccggcgtctccctgaagtctctgaacccgcagctgggcacggatgcagacaaggagcagtggaaggatgtgcacaagcaggtggttgacagtgcatacgaagtgatcaagctgaaaggttacacatcctgggccattggcctctccgtggcagacttggccgagagcataatgaagaaccttaggcgggtgcatcccatttccaccatgattaagggtctctatggaatcaaggaggatgtcttcctcagcgtcccatgtatcctgggacaaaatggaatctcagatgttgtgaaggtgacactgactcctgacgaggaggcccgcctgaagaagagtgcagataccctctggggaatccagaaggagctgcagttctaaagtcttcccagtgtcctagcacttcactgtccaggctgcagcagggtttctatggagaccacgcacttctcatctgagctgtggttagtccagttggtccagttgtgttgaggtggtctgggggaaatctcagttccacagctctaccctgctaagtggtacttgtgtagtggtaacctggttagtgtgacaatcccactgtctccaagacacactgccaactgcatgcaggctttgattaccctgtgagcctgctgcattgctgtgctacgcaccctcaccaaacatgcctaggccatgagttcccagttagttataagctggctccagtgtgtaagtccatcgtgtatatcttgtgcataaatgttctacaggatattttctgtattatatgtgtctgtagtgtacattgcaatattacgtgaaatgtaagatctgcatatggatgatggaaccaaccactcaagtgtcatgccaaggaaaacaccaaataaaccttgaacagtg

SEQ ID NO: 910 - DNA, 650 bp, Rattus norvegicus
  Genbank Accession No. NM_017050
gttttgcaccttcgtttcctgcggcggcttctgtcgtctccttgctttttgctctcccaggttccgaggccgccgcgcgtctcccggggaagcatggcgatgaaggccgtgtgcgtgctgaagggcgacggtccggtgcagggcgtcattcacttcgagcagaaggcaagcggtgaaccagttgtggtgtcaggacagattacaggattaactgaaggcgagcatgggttccatgtccatcaatatggggacaatacacaaggctgtaccactgcaggacctcattttaatcctcactctaagaaacatggcggtccagcggatgaagagaggcatgttggagacctgggcaatgtggctgctggaaaggacggtgtggccaatgtgtccattgaagatcgtgtgatctcactctcaggagagcattccatcattggccgtactatggtggtccacgagaaacaagatgacttgggcaaaggtggaaatgaagaaagtacaaagactggaaatgctggaagccgcttggcttgtggtgtgattgggattgcccaataaacattccctatgtggtctgagtctcagactcatctgctgtcctgctaaactgtagaaaaaaaccaaaccattaaactgtaatcttaacagtt

SEQ ID NO: 911 - DNA, 1358 bp, Rattus norvegicus
  Genbank Accession No. NM_017052
cgacctcaaagcaagagagcgacatggcagctcctgctaagggcgagaacctgtccctggtggtgcacggacctggagacattcgcctggagaactacccaatccctgagctgggcccaaatgatgtgttactaaagatgcattcggtggggatctgtggctcggatgttcactactgggagcatggccgaattggggacttcgttgtgaaaaagccaatggtgcttgggcatgaagctgctggaacagtcacaaaagtgggaccgatggtgaaacatctaaaaccaggagatcgggtggccatcgagcctggcgttccccgagaaatagatgaattctgcaagatcggccgatacaatctgacgccatccatcttcttctgtgccacgcccccagatgatgggaacctctgccgcttctacaagcacagcgctgacttctgctacaagcttcctgatagtgtcacctttgaagaaggggccctgattgagcctctctctgtggggatctatgcctgccgtcgaggttcggtttccctggggaacaaggtccttgtgtgtggagctgggccaattgggatagtcactttgcttgtggccaaagcaatgggagcttctcaagtagtggtgattgacctctctgcttctcggttagccaaggccaaggaagttggagcagactttaccatccaggttgccaaagagacccctcacgacattgccaagaaggtggaaagtgtgctggggagcaagccagaggtcaccatcgaatgcacgggagcggagtcctctgtccaagacggcatctatgccactcactctggcgggaccttggtggttgtgggaatgggccccgagatgatcaatttacccctagtgcacgcagctgtgcgggaggtggacatcaaaggcgtgtttcgatactgcaacacgtggccgatggcagtttccatgcttgcatcgaagactttgaatgtaaagcccttagtgacccataggttccccctggagaaggctgtagaagcctttgaaacagccaaaaagggactggggctgaaagttatgatcaagtgtgaccccaatgaccagaacccctaaatgtgattgctctatgcccttagcccactctctcagcatctaagggctaaatggaccagaaggggaagccattaatgcagaaccttctttttgaatggtaggaataataaactcataagccgagagccttagaggagctggcgtgccttaaagacagaagtaggggcaccttgggggacctcgtagccagaatgagatgcgtatactgagtaaagtctagaaccaagagtctggcagagaggtcccgaaatgccctttctc

SEQ ID NO: 912 - DNA, 4557 bp, Rattus norvegicus
  Genbank Accession No. NM_017061
cttctacttcagacactgtgcgctctcccggaccgtcgtgcgccgctccccgtcgccttccaggactgggaaaggggagaggaggacggtgccacgtccgacggcctcctgggctgggggcagggtctgccgctcgcccttggcaccagtccctgcgacccatccccgagcctcgccctcctcctccctgctcgaagaggtctccctccttcgcgggatctgagtccctgtcttcatttttctcctagccacgtccctccccgagaagggacgagccgggagcatcatgcgtttcgcctggaccgtgctctttctgggacagctgcagttctgtccccttctccgctgcgccccgcaggccccgcgcgagcctcccgccgcccccggtgcctggcgccagacaatccaatgggagaacaacgggcaggtgttcagtctgttgagcctgggggcgcagtaccagcctcagcgacgccgcgactccagcgccactgccccgagagccgacggcaacgctgcagcacagccacgcacgcccattctgctgctgcgtgacaaccgcactgcctctgcccgtgcgaggactccaagcccatctggggtcgccgcgggtcgtccccggcccgcagcccgccactggttccaagttggtttctcgccgtcgggggccggcgatggagcctcaaggcgcgcagcgaaccggactgcgtcgccacagcctccgcagctcagtaatctgaggccacccagccacgtagatcgcatggtgggcgacgacccctacaatccctacaagtactccgacgacaacccctattataactactatgacacttatgagagaccccggtccgggagcaggcaccgacctggatatggcaccggttacttccagtacggtctcccggacctggtacccgatccctactacatccaggcatccacgtacgtacaaaagatgtctatgtacaacctgagatgcgctgcggaagaaaactgcctggccagttcagcatatagggcggatgtcagagactatgaccacagggtactgctacgatttcctcagagagtgaaaaaccaagggacgtctgacttcttaccaagccgcccccgctactcctgggagtggcacagctgccaccaacattaccacagcatggatgaattcagccactacgacctgctggatgccagcacacagaggagagtggccgagggccacaaagcaagcttctgtctggaggacacttcctgtgattatgggtaccacagacgatttgcctgtactgcacacacacaggggttgagtcccggatgttatgatacttatgcagcagacatagactgccagtggattgatattacagatgtacaacccggaaattacattctaaaggtcagtgtaaaccccagctacctggtgcctgaatcagactacagtaacaatgtcgtacgctgtgaaattcgctacacaggacatcacgcctatgcctcaggctgcaccatttcaccgtattagaaagaagctcaccttcccaaaggatgaagcagtacctggtgtttggacctatgaaaaccgtagattagcttaagtaggaagacttagatattttaaaaggcaaacggaaaaacaacaaagaaggttttgtttggactctttcacaacaaatcacataactggattttgagtgtttaaatcagcattagattggcacattttaaatacttattcatgttgctttatgaagtaatggtgtttcaattctgtgggtgcatagtgggctctttcaaagaattctgaatttcttaccttcttttgaaattatagtgcaaaaagaagaggatattttaatgaatgagccacaatttgaactgattactttctaaattgccagacccatgagacaatgatgatgggtttgtatttgcctcaacatagattcgctttttaaaaagggtgttcctattgtataggcaaaaatggatacacttggtgctgaggaagggtcaaatactaactattgttgtcacgaaatataggtctacagcagagagatggtgagtatatattcagatagttacatccctatataaactatgtttacattttagatgcttttctttctgttaattgcttaatctcactctgacttgaggtacaacttctgttttggaatgaattagataattccagattctggtttgataattgttgacattcccccatgctactttttctgagggcagaaacgtctaatgtgacgactcttcacattaccattacgaggatacacagcacagcgaaatcattccgatgacaggtgtgatagatggagagctaacatgcaactgccgagtgtttcactgttagccagaactaagtcactgcccacacagcaattacaccatgaatctctaacatcacaaccttctttcaaatactgtaaaaaaaaaaatactggaaaacctttttagatttgtttcaatctaccacgcttctgaaatgttcagctattaaggggaatgtcaatatatatatacagcccaaattagcgaagcccaaattagggaagcacatagcatggcatacttgagaggttggcaaacaagagggaagcaggtactttctgcaaaaacagggactgtgcgccacaatgagaccgctgtgaccttacttcaaactgtgaaactgtgtgcagcagtaggatttggagtcttaaattcagaaggagcagaaagaaagagagttagacgtttgaattcctggtgcttatgctgacgttttctctcatttgccagcattaaaatctcaagtaaggtgtctcctgtgccaggacgtgtcaggtagacctttctcagtgagctggaatcctgccttctgtgtcatagagttgtaagagcagcagtttctacccatcatgctgtgtactcactgctgcagagcaagtgggaggggccagagatgggccgtccccaggggcggatagcgcggtacacttaattctcttctgcctgaaagcacacttccccgtaagcgaatacagacagaactttgattgagctggtatctgaccgataggattgcttctttgatgtacctctttgacctagctagcatttcagctttgatactgcagaacgatcttttcaaattataatcattctgatagagatatcttaatagacgtgcttttaaaaacaaaacggaaactactgtcagtatgaatactgagccagactggcattcatagatttaacaacttgtatttctaagattcttaactctataaaagtaatatggcttttagatatataggataataatttcagtgagaccgttatctctttactcaacattatgttagggacagtataagccaagcacttacctgttacacattggagactaaaacgactgcccccaaccttagtaagtatgaaaactagactcacattatttcatttttaactgctaaaagtatgtctatagaatttaaaatttaagcactactatttgtcctggccacatttttcaaaaattaagttaaaagttattaattatatacaggtgtgtatttctaataattaaaatacctttcaaatccatggaatgtctgccttttaaatgtaatttgggcttttttgtttgattctttttcacttaactagctgtttatttgtaaacatttctttccacgatttaaaaacacttccaatcggctttacttcctgatttagcacttcctattttgacccttgggcatctgttcttcgtttaattggtgtagaataatgataaaaatcccaagctagtctaaccaaactgcattcttaagagtactaagtgggaatgatgcaaagttcatcaagaattgaaaagaagccggtctttgcactaaggaagacagcataattaagtcttctcgttgccatctgagtaatatcatgatatggggaccgcagaatccatctccggtgggatgatggtatagctttcctagttccagaaaaaatctccttcacattttatataataatttaatcacaatgtccatcgaattcttccttaggcattctttgtaacagtagtgtgctgctctttaaaatattaacctctgacacatgtgtgaacctcattccctgtggtcactaaaatttcttccccactgagcatcaatctttagcagattttaggaaaatactgaattcttagtcaggaaatattttaggaataatcttgctaacagtatattaagtaataaaattacccactctatgtgtgtttcattttttttaatttacatagacaatggtttttataaagcaatgatttcaatttttcccagctacccaaagtcctggttaatttgtgaacacaaattttgttagccttcaagtttaaacggtgctgaattgtcttaacttgaatgtaaaaatggattaaggcttatctcatgggacacaaacatgtcccatatgactgcttgctgcgtactaggggacatgccatttggtgttaaattgtctataataaagttcggtttctcccaaaaa

SEQ ID NO: 913 - DNA, 1743 bp, Rattus norvegicus
  Genbank Accession No. NM_017074
ccgtcccagcatgcagaaggacgcctcctccagcggcttcctgcccagcttccagcactttgccactcaggccatccacgtgggaccagagccggagcaatggagttcgcgtgctgtggtgctgcccatttcgctggccaccacgttcaaacaggactctccaggccagtcctcgggttttgtatacagccgctctggaaatccgacgaggaattgcttggaaaaagcagtggctgcactggatggggcaaagcactgtttgaccttcgctcggggccttgccgccaccacaacgattacccatcttttaaaagcaggagatgaagtcatttgcatggatgaagtgtatggaggcaccaacaggtacttcaggagggtggcatccgagtttggactgaagatttcttttgtggattgttccaaaaccaaattgctggaggcagcgatcacaccacagaccaagcttgtttggattgaaacacccacaaacccaaccttgaagttggccgacatcaaagcctgcgcacaaattgtccacaaacacaaagacatcattctggttgtagataacactttcatgtctgcatatttccagagacctttggctctgggtgctgatatttgtatgtgttctgccacaaaatacatgaacggccacagtgatgttgtcatgggcttagtgtctgttacttccgatgacctcaacgaacggcttcgtttcctgcagaattctctcggggcagttccttctcctttcgattgttacctctgctgccgaggcctgaagacactgcagatccggatggagaaacacttcaggaatgggatggcagtggcccgtttcctggagtctaatccccgggtagaaaaggttatttatcctgggctaccgtctcaccctcagcatgagctcgccaaacgtcagtgcacgggctgccccgggatggtcagtttctatatcaagggtactctgcagcatgctcaggtcttcctcaaaaatataaagctgtttgctctggctgagagcctgggaggatatgagagtctggctgagcttccagcaatcatgacccatgcctccgtgcctgagaaggacagagctaccctcgggatcagtgacacactgatccgactttctgtgggcctagaggatgaaaaggaccttctcgaagacctgggtcaagctttaaaggcagcgcacccttaaagttcgagtcaaagccggcattccagtgctgccatcagcagcagcagccaaggggccagaccttctgaataactggacagaccattaaggagcatctgcagaacttcgcagtgaacattttaagaccctagtgattttacagctgtaaccttacagggatcttcccttaaggactgtcttctgctaacaggttgttctgttagtatcattctgatagttttgctgtatttgtgttcaaggaagagagttgtattattttggggatcatgttgcttcttttttcctttttctttcttcggtagcctaagatatgttttaatcatgtttacaaaatttagtattgatgttttatgaagttaaattattcaatgaacggtcttaaatcaactgtaggggttttttttttgaaaaattattgaaagtggggggtctttatttaattaccataagccaaaaaaatcaaatatttggaatatctactgtgaaattctagtgattaaaggttgtacttgatacttgttgtttttcttaaatgg

SEQ ID NO: 914 - DNA, 1864 bp, Rattus norvegicus
  Genbank Accession No. NM_017081
ggaaagcgagtatccctcccaccccaggctggtgttcctctgcactccgtgtcctggcccagagtccctctcggcgctccccaacccggcccccgcccctccctagaccggccgggccccgaagtcatggagcgctggccttggccgtcgggcggcgcctggctgctggtggctgcccgcgcgctgctgcagctgctgcgctcagacctgcgtctgggccgcccgttgttggcggcgctggccctgctggccgctctcgactggctgtgccagcgcctgctgcccccgccggctgcactcgtggtgctggctggtgctggctggatcgcgttgtcccgcctagcgcgccctcctcgcctgccggtggccactcgcgcggtgctcatcaccggttgtgacactggttttggcaaggagacagctaagaaactggatgccatgggcttcacggtgctggccactgtgttggatttgaatggccctggtgctctagaactgcgtgcccgatgttcccctcgcctgaagctgctgcagatggacctgaccaagccagaggatatcagccgtgttctggaaattaccaaggctcacacggccagcactggcctgtggggtctggttaacaatgctggcctcaacatggtagtggccgatgtggaactgtctccagtggtaactttccgcgaatgtatggaggtgaacttctttggtgcacttgagctgaccaagggcctcctgccactcctacgtcactcaaggggacgtattgtgaccgttggcagcccagcaggagacatgccatacccctgcttggcagcctatggaacctccaaggcagctattgcactgctcatggacacattcagctgtgaactgcttccctggggtatcaaggtcagcatcatccagcctggctgcttcaagacagaggcagtgactaatgtgaacctctgggagaagcgcaagcaactgctgctggccaacttgcctagagagctgctgcaggcctatggtgaagactacattgagcacttgcatgggcaattcctgaattcactcagaatggcattgcctgaccttagccccgttgtagatgccatcattgatgcactgctggcagctcagccacgcagccgctactacacgggccgtggcctggggctcatgtatttcatccaccactacctgccaggaggcctgcggcgccgcttcctacagaacttcttcatcagtcaccttctaccccgagcactgaggcctggccaacctggccctgttcatgacacaacccaggacccaaacccttcccccacagtatcagctctgtgaaccacaaacttaggtgtttcagcaggagaggcttcttgagcccttggccctctcccctggccattatagacccctcaacctttccctagagtctctgttaagaaaagcccagcctctactgctgatgccgagtccaggcccgggaggtggaatttgctagtgatcctctggacctctcctctgcttcatgagaccatgtataccctaccaggcacgacccttcagcttggagagcccagatggatggagagtttagcgtgagatgtggctgcaacctttgagaggatgctacagaccacttctgtgctgactttagaatgattagacatgtggggcctcctcagaattctttgggtacccactgtctcagtgctgcagtccagagtaaatccctcttgactggctcaagatttaggttcccaaccactggctcccagccacatggaagctgtatgctgtatttgtctggttgttggcattttaaaataaagatacatttttttatttctcctagaatgggagagatagtgtttgg

SEQ ID NO: 915 - DNA, 988 bp, Rattus norvegicus
  Genbank Accession No. NM_017084
caggatggtggacagcgtgtaccgtacccgctccctgggggtggcggccgaagggatccccgaccagtatgcggatggggaggccgcacgtgtgtggcagctgtacatcggggacacccgcagccgtactgcagagtacaaggcgtggttgcttgggctgctgcgccagcacgggtgccaccgggtgctggacgtggcctgtggcacaggagtggactcgattatgctggtggaagagggctttagcgtcacgagtgtggatgccagcgacaagatgctgaaatacgcactgaaggagcgctggaaccggaggaaggagccagcctttgacaagtgggtcattgaagaagccaactggttgactctggacaaagatgtgccagcaggagatggctttgacgctgtcatctgccttgggaacagttttgctcacctgccggacagcaaaggtgaccagagtgagcaccggctggcgctaaagaacatcgcaagcatggtgcggcccgggggcctgctggtcatcgaccaccgcaactacgactacatcctcagcacgggctgtgcacccccagggaagaacatctactataagagtgacctgaccaaggacattacgacgtcagtgctgacagtaaacaacaaagcccacatggtaaccctggactacacagtgcaggtgccaggtgctggcagagatggcgctcctggcttcagtaagtttcggctctcttactacccacactgtttggcgtctttcacggagttggtccaagaagcctttgggggcaggtgccagcacagcgtcctgggtgacttcaagccttacaggcccggccaggcctacgttccctgctacttcatccacgtgctcaagaagacaggctgagcctggctccggctcccaccctaagaccatcgcctaccacagatattgcagagatgtggggggcaggcaaacagggagtcgacaatacagccttcccttgcc

SEQ ID NO: 916 - DNA, 4775 bp, Rattus norvegicus
  Genbank Accession No. NM_017090
gaattccggattacagacacgtatgtcatatggatgttggagatttgaactcaggtcctcatgtttgggtggtaagtggttctaaccactgagctgtctcaccagtctcagtggggtacccacactgaccactctccgcccactcctgaaatgccctttgttctccccatccctacgctatctctgagagctcacccccatacccttctgttctcacacacagccttccaggcgtctctcagtgcctgccagccgaccccaaggcgaaggagcatgcagtgctcagcccggggagtcctcgaagcgaagacacctgcaccggatgcccctggcctcccgtgaccgcatcatgatgctgggccactcgtgtctttgagtcagtagaagcagatcttcatcagtccacatcaacaccggctaataaggaggaaaccactgccaagctccaggaacaccatgttctgcaggaagttcaaagatctcaagatcacgggggagtgtcctttctccttactggctcctggtcaggttcctacggagccaatagaggaggtggccggagtctctgagagctgccaggccactctgcccacctgccaggagtttgctgagaatgcagaagggagtcacccccaaagaaagacaagccgcaacagagtctacctacacaccctggcagagagtattggcaagctcattttcccagagtttgagagactgaaccttgcacttcagagaacattggcaaagcacaaaataaaggaaaacaggaattcttcagaaaaagaagaccttgaaagaataattgcagaagaagcaattgcggcaggtgtcccagtggaggtgctcaaagactctctgggtgaggaactgttcaagatctgttatgaggaagatgagcacatcctgggcgtggttggcggcaccctgaaggactttctcaacagcttcagcacgctcctgaagcagagcagccactgccaggaggcggagaggcgggggcgactggaagatgcctccatcttgtgcctggacaaggaccaggactttctaaatgtttactacttcttcccgaagagaaccacagccctgcttctccccggtatcattaaagcggctgctcgcatactgtacgaaagccacgtggaggtgtccctgatgcctccctgcttccgaagtgagtgtaccgaattcgtgaaccagccctatttgctctactcggtccacgtgaagagcaccaagccttctctgtccccaggcaaaccccagtcctcgctagtgatccctacttcgctcttctgcaaaactttcccattccacttcatgctggaccgtgacctggccattctgcagctgggtaatggcatcagaaggctggtgaacaagagggacttccaagggaagcccaactttgaagagttctttgaaattctaactcccaaaatcaaccagacatttagcggcatcatgacaatgttgaatatgcagtttgtcatacgggtgaggagatgggataacttagtgaagaaatcttcaagggttatggacctcaaaggtcaaatgatctacatcgttgaatccagtgccatcttgttcttagggtcgccgtgtgtggacagattggaagatttcacaggacggggtctctatctgtctgacatcccgattcataatgccctgagggatgttgtcttgataggggaacaggcacgggctcaagatggcctcaagaagaggttgggaaagctgaaggcaaccttggagcatgcccaccaagccctggaggaggagaagaagaagacggtagatctcctgtgttctatctttccctctgaggttgctcagcagctctggcaaggacaaattgtgcaagccaagaagttcaatgaggtcaccatgctcttctcagatatcgtagggttcactgccatctgctctcagtgttcacctctgcaggtcatcaccatgctcaacgctctctatactcgctttgaccaacagtgtggagagctggatgtctacaaggtggagaccatcggagatgcatattgtgtggcagggggattgcacagagagagtgacacacatgctgtccagatagcactgatggccctgaagatgatggagctctccaatgaggtcatgtctccccacggagaacctatcaagatgcgaatcggactgcattctgggtcagtgtttgctggagttgtcggagtgaagatgccccgatattgcctgtttggaaacaatgtcactctggctaacaaatttgagtcctgcagtgtgcctcggaaaatcaatgtcagccccacgacatacaggttactcaaagactgtcctggctttgtgttcaccccgagatcgagggaggagcttccaccaaacttccctagtgacattcctggaatctgtcactttctggatgcttatcaacatcaaggacctaattctaaaccatggttccagcagaaagatgcagaagatggaaacgctaacttcttaggcaaagcatcaggggtagattagtgagccgcatgtttctgtgtttgatgcctttgaggggtgctcagaatctctgaaatgactttaggattgcagaagataaaaaactgtgttaaaattgcaggggtgaaacccagtttcctctgtttcccatttaagatggaaaaaaaaaagtattcaatgcttcagcgctttcaaccttcttctctatttaagaaacaaacctcaaaagtgacttgtgacttttggggacatagctttgttctagagcagtcactacctgcactcgaaatccaacacagtgtacatattccagacaattgtagtcaagtttaagtgtcaaagtaatgtactcacctgtggcctgtgaccagtgcaaactgtggttattacagtgtgtctgtggtagtgttgcctgtaaatctctgaatagaaatgacagtgtttaattctgcaagagcttccagcctcttgactctacattcaattaggtttccttattctatcctggcgtatgtaacacaataggccagcgccttcttcccagctacatctttgtgcctatgtacgtgttttcctttcctttcctttcctttcctttttttttttaagaaaataagcaattagacataggataaaatgtgatataaagtagttcagtaagtgtcaaagaatattttcatgttttgtcattaaagatattatctatagcacaatatataatacaacaaatacttttcattttgatcctatctgtgataaaacattttaattaatagtaacaatgtactccctactaatccatgtaaaatttactaatagcaaaactttcagagtaaaagtatttacatacattgttaaaatgcaataacattcaaatttaattaaggcatagaattaatatttgcacacagagagcctactgtagaggacagtggcaaagtgttcacaaacacacgtgtttaaatgatcctctactgccgtgttgagccataaaagccaaggggaaaagttttaagttagaagtagaaaaatagacttcattttgtctttttttgataccttcttaagtatttctactgaccatttagtgtatgtgtatgtgttaagaatcaaaatttttattactcagtgtacacctgtgagtattattctactttaaatatactaatattttctacagaaaccactagtatcattgaagaaaatgtctatgatttcattatagagatcctgatacgtttttttttttcttctggagtttaaactaatgtcctttccttcccctgccctcctccgcagtcctctttcttcctctcccattaggcatgtttgtgtgattctgtgggctgacacaggaaactgtgcatgctgggtaaagactgttactgagtaacttcctcaccatgaggcttcagttttattgctaatggtgacagtttacattcccgagtgttaatttggtaaaaggaagtgactttaaaagaagaccaacttcaaagccaagagagatagacataattgaatttttcaatcagtattagtagaacgctagacattctgaatttctatgtgtgtagttgaaaagaaactcagtttaaaagtcattttctacctccaatagtcttcaagcatccagagcaacagacatcttttacctagctctagtttccaagggggacaactaaaccacccaatggatttctttaaaggcggatattgtctcattaaacagtcacactgatgttggatagtgtcacgggccctgcaaaggtgtatttaggatgtcacaatgatgtggaattcaatgaatatttattaaggaggtaaagaggtaaataccccctctttctggaactaatattcaatacaggggaactagtaggaatcacagacaattagaaagcgtaaaacaggatgtcatcctcttaagctgtgcagttaggtggttgctacattagtaataatctgattcagaagcttgcacattaattagaattaattctcccactgtcttttagggatggtgatagaactcaatgacaaagcacctgcctagcatttaggcagtcctgttctgacccaagcagcatgaaggaattacatgtatctctcatgtgcatatgatgtatgatcacactcacctgtgtcacctgtgtacacacctggggcaaatggaggaactgtatctaattcaaggcaaactaccggagctccatgtacggttcctataacttttctattattttgtcattttagcaaaaaaaaaa

SEQ ID NO: 917 - DNA, 2950 bp, Rattus norvegicus
  Genbank Accession No. NM_017094
gaattccggagagaccacaagatagaggattattaatttatggggattttttggagatttatatacccaagcaacaactcctagatgctacagaccaagacaccaagaaataaccacgaaattctactttcaaccctagcttctctaccagattttaactaaacaagatcttcttgcaaaggtctcaggtatggatctttggcgggtgttcttaaccctggcactggcagtctccagcgacatgtttcctggaagtggggctacaccagctactcttggcaaagcttccccggttctgcaaagaattaatccaagcctgagggaaagttcctctggaaagcctcgattcaccaagtgtcgttcccctgaactggagaccttttcatgctactggacagaaggggatgatcataatttaaaggtcccgggatctattcagctatactatgctagaagaattgctcatgaatggaccccggaatggaaagaatgccctgattatgtctctgctggagcaaacagctgttacttcaactcatcgtatacctccatttggataccctactgcattaagcttactacaaatggtgatttgttggacgaaaagtgtttcactgttgatgaaatagtgcaacctgatccgcccattggcctcaactggactttactaaacatcagtttgcctgggatccgtggagatatccaagtgagttggcagccaccgcccagtgccgatgttctgaagggatggataattctggagtatgaaattcagtacaaagaagtaaatgaaacaaaatggaaaacgatgagcccgatatggtcaacatcagtcccactgtactcactgagactggataaagagcacgaagtgcgtgtgagatccagacaacggagcttcgaaaagtacagcgagttcagtgaagtactccgtgtaacgtttcctcagatggacacactggcagcatgtgaagaagatttccggtttccatggttcttaattattatctttggaatatttggagtagcagtgatgctatttgtagttatattttcaaagcagcaaaggattaagatgctgattttacccccagtaccagttccaaagattaaagggattgatccagatcttctcaaggaaggaaaattggaggaggtgaacaccatcttgggcattcatgataactacaaacccgacttctacaatgatgactcctgggttgagttcattgagctggatattgatgatgcggatgagaagactgaagagtcagacaccgacagacttctaagcgatgaccaggagaaatcagctggtatccttggagcaaaggatgacgattctggacgtaccagctgttatgaccctgacattttggataccgatttccacaccagtgacatgtgcgatggtacctcggagtttgctcagccgcagaagttaaaagcagaagctgatctcttgtgccttgaccagaagaatctgaagaactcgccttatgatgcttcccttggctctctgcacccctccattaccctgacaatggaagacaaaccacagccacttctgggcagtgaaactgagtcaacccaccaactcccctctacaccaatgagcagtcccgtgtcactggcaaacattgacttttatgcccaagtaagcgacattacaccagcaggtggtgtagtcctttctccaggccaaaagattaaggcagggttagcccagggcaacacccagctggaggtggccgcgccctgccaagaaaattacagcatgaacagtgcctacttctgtgagtcagatgccaaaaagtgcatcgctgcggcccctcacatggaggccacgacatgtgtaaaaccaagctttaaccaagaggacatttacatcaccacagaaagccttaccactactgcccgaatgtccgagacagcagataccgctccagatgctgagcctgtcccagactacaccacggttcacaccgtgaagtccccaaggggccttatactcaacgcgactgctttgcctttgcctgacaaaaagaagtttctctcctcatgtggctatgtgagcacagaccaactgaacaaaatcatgcagtagcctttcctatctttaatggcaaaagaaatgactgggcacgaacgcctaaaccaaaactatgttttaaatctgtgttgggagagcgtgagagtgaatgtggattcaaaaataccttttctggaaacgtcgaaacattatcataacgtggaaaatcaagaatatgtaatcagatagatactcccattgtgaattttaaatattttaagatcgtctttaagactgtttgtggcagtgattgtctgtgctgtgggtcttaactttgtgatactaagttattaaatagctacgtttttcatgtatgtagatcattgctttttttgaaaaagcaaaacaatcaggtggcttttgcagttcaggaaattgaatgcagattttagcacagactgatttctttttcctttttaaatagctaggagctaaaactctaggggagaaggtaaaactagtttggatatgcaaaacatttattttgacataaaattgataaagatatttttaataatttacactgtaagcatgagtattttataatacactacagatatattgttagttcacaacaatccatctacggatgtaacaactacaatgtgtagaggggttgatgctttggtcaatgaacctaaagaaaaatgaacaagttagatttttacaaagcccttttttataactcccaaaacttcttaaatctaaaaatgtctgcattattggaacaaacccattttaaatttgtaaatgaatatttttttaattttgaaaactttaattttttatacaaattaacgtatcatacaccaaacagtaacagaagtgattataataatggaagaaacagtttcttcc

SEQ ID NO: 918 - DNA, 743 bp, Rattus norvegicus
  Genbank Accession No. NM_017101
ctttgcagacgccgctgtctcttttcgccgcttgctgcagacatggtcaaccccaccgtgttcttcgacatcacggctgatggcgagcccttgggtcgcgtctgcttcgagctgtttgcagacaaagttccaaagacagcagaaaactttcgtgctctgagcactggggagaaaggatttggctataagggttcctcctttcacagaattattccaggattcatgtgccagggtggtgacttcacacgccataatggcactggtggcaagtccatctacggagagaaatttgaggatgagaacttcatcctgaagcatacaggtcctggcatcttgtccatggcaaatgctggaccaaacacaaatggttcccagttttttatctgcactgccaagactgagtggctggatggcaagcatgtggtctttgggaaggtgaaagaaggcatgagcattgtggaagccatggagcgttttgggtccaggaatggcaagaccagcaagaagatcaccatctccgactgtggacaactctaatttctttgacttgcgggcattttacccatcaaaccattccttctgtagctcaggagagcacccccaccccatctgctcgcaataccctgtaatctctgctctcactgaagttctttgggttccatattttcctcattccccttcaagtctagcaggattgcaaagttaagtttatgattatgaataaaaactaaatgagaagtgtt

SEQ ID NO: 919 - DNA, 2758 bp, Rattus norvegicus
  Genbank Accession No. NM_017111
catgagtgtacttctctcttggctaagaaagacagcaaagcaaagacttttaaagcgaagaagctggaaacaatcagaagaacaccatggaagaaacagagaaaaagattgcaacacaagagggtagattgttttccaagatgaaggtgtttctgctgtcattaacatgtgcatgtttaaccaaatcactatcaggagtatatatgaattccatgctcacacaaatagagagacaatttgatatctccacatctgtagctggattaatcaatgggagctttgagattggaaacctttttttcattgtatttgtgagttattttggaacaaaactgcacagacctgtggtgattggtattggatgtgtgattatgggcctggggtgtctcttaatgtcattacctcatttcttcatgggcagatacgaatatgaaacaacgatctcacctacaggcaacttgtcctcaaacagcttcttgtgtatggagaaccgaacacagaccttaaagccaacgcaagacccagcagaatgtgtgaaagaaatgaaatcattaatgtggatatgtgtaatggtaggaaatattatacgtggaattggtgaaactcctattgtgcccttgggtatctcttacatcgaagactttgccaaatcagaaaactctcctttatacattgggattttagaaatggggaaggttgctggcccaatttttggacttttgttgggatcttactgtgcacaaatttatgtagacattgggtctgtgaatacagatgacctgaccataacacccagtgatacacgctgggttggtgcttggtggattggctttttggtctgtgcaggagtgaatatcctgaccagcatcccctttttctttttgccgaaagcacttccaaagaaaggacaacaggagaatgttgctgtgactaaagatggcaaagttgagaaatatggaggacaagccagagaggaaaatcttggaatcactaaagatttcttgacgttcatgaagaggctcttctgcaatccgatttacatgcttttcatccttacaagtgtgctccaggtgaatggctttattaataaatttacgttcttgcccaaatacctggaacagcagtatggaaaatctactgcagaggcaatattcctcataggtgtttatagcttacctcccatatgcctcgggtatctaattggtggctttattatgaagaagtttaagattactgtcaagaaagctgcatacctagcattttgcctatcggtgtttgaatatcttctttttctttgtcactttatgttgacctgtgacaatgcagcagttgctggattaaccacctcttacaaaggagttcagcaccaactacatgtggagagcaaggtccttgctgactgcaacacaaggtgtagctgctcaacgaacacatgggatccagtgtgtggagacaatggtgtagcatacatgtcagcttgccttgcgggctgtaagaagtttgttggaactggaaccaacatggtgtttcaggattgcagctgcattcagtcattaggaaactcgtctgcagtcctgggtctgtgtaaaaaaggtcctgagtgtgccaacaggctgcagtactttttaatcttaacaataattatcagtttcatctactcacttacagccatacctgggtacatggtttttttgaggtgtgtcaagtctgaagagaagtcacttggagttggattacatacattttgcataagagtatttgctggtattcccgcacctgtttactttggcgctttgatagacagaacctgtttacattggggaaccctgaaatgtggtcagcgaggggcatgcaggatgtatgacataaacagtttcaggcacatttacctggggttgcctatagcactaagaggatcaagctatctgcctgccttcttcattctgatacttatgaggaaattccagttccccggggacattgactcttcagcaactgatcatacagagatgatgctcggagagaaggaaagcgagcacacagatgtgcatggaagtcctcaggtcgagaatgacggagaactgaaaacgaagctgtaatgagttttctactgccctgttcaaggccatgaacagaatgcacacttcccttcctcggaatcctgagagatacaataggaaccttctctttaaggacctcaacaattgtttttctcactataaaaataattgctgatatcatttttatagtgagaaaaacaataaaaataattgctgatatcattttcagaatttcaggtgatatttaagatttccctggggaagacttttatggtgacccccacactacactttaaagcttccttcattttcacataacattttctcttaactcaatcaagggaaatatgtgtttcccacacatctttaaatgagtataaaactttcctattcctgaaacagtatttaatttcattgaatttatggttcacagttggaagtatttagagctgaaaagatacattctcattaagccacattgaaaagttaacttttctatgttcaggatgtctccatatgtctatatgtaggagttctcaaatattattattattgtagacatgatgctcctagattagacttctcactcctgtgtcatttcctgtttctagtcccttctttcattactcctgtcacacagttgaatgttttgtttagagcactgacaaacttaatcaggttattaaaaatcacattag

SEQ ID NO: 920 - DNA, 2199 bp, Rattus norvegicus
  Genbank Accession No. NM_017136
ccggaaggagttcggcaggtctcccggaccccctttgtgaactacattttgggtagaacattttaatcaccgaaacccttctgaggaaaaaaagactcccactgccccctgcaaaaaaacaaaagcaaaaacaaaaaaaccaaaccccaaacccccaaatctcagtcttagctggtgccaccaaagaagcttttgagccatgtggacttttcttggaattgctactttcacctatttttataagaaatgcggggatgtcaccctggccaacaaggagctcctgctgtgcgtactggtgttcctgtcgctgggcctggtgctctcctaccgctgtcgccatcgaaacgggggcctccttggccgccatcagagcggctcccagttcgctgccttctcagatattctctctgctttgcctcttattggcttcttctgggccaaatcaccccctgaatcagaaaagaaagaacagctggagtccaagaggcgcagaaaagaagtcaatctgtcagagacgacgttaacgggagcagctacctcagtatcgacatcatctgtgacggacccagaagtgatcatcatagggtctggtgtacttggctctgctttggcaacagtactctctagagatggaagaacggtgacagtaatcgagagagatttaaaagagcctgacagaatacttggagagtgtctgcagcccggtggctatcgagttcttcgagagctgggccttggagatacagtagaaagtcttaatgcccatcatatacacggctacgtaattcatgactgtgaaagcaggtctgaagttcaaattccatacccggtgtcagaaaacaaccaagtacagagtggggttgctttccaccatggcaagttcatcatgagtctccggaaagcagctatggcagagcccaatgtaaagtttatagaaggtgttgtgcttcggttactagaggaagatgatgctgtgattggtgtgcaatacaaggacaaggagactggggacaccaaggagctccatgccccgctcactgttgttgccgacgggctcttctccaagttcaggaagaacctcatctccaataaagtctctgtttcctcccacttcgttggcttcattatgaaggatgcaccacagtttaaagccaatttcgcggagcttgttctggtcgatcccagtccagttctcatctaccagatttcacccagcgaaactagggtgcttgtcgatattcgaggagaattgccaagaaacttaagagaatacatgacagaacaaatttacccacagatacctgatcacttgaaggaatcatttctggaggcctgtcagaatgctcgtctgcggaccatgccagcaagcttccttcctccttcctcagtgaacaaacgaggcgtcctacttctgggagatgcgtataacctgaggcatcctcttactggtggaggaatgacagtcgctttaaaagatataaaaatatggagacaactgttaaaagatattcctgacctttatgatgatgccgctattttccaggccaaaaagtcattcttttggtcaagaaaaaggagccattcctttgttgtgaacgtgctggctcaggcgttgtatgaactattttctgctacagatgattccttgcgtcagctccgaaaagcttgctttctttattttaaacttggtggagaatgtttgactggtcctgttgggttgctttctatattgtctcctgaccctctcctattgattcgacacttcttctccgttgcagtctatgccacgtatttctgcttcaagtcagagccatgggctacaaaacctcgggctcttttcagtagtggtgctatactgtacaaagcgtgctctataatatttcctctcatctattcagaaatgaagtatctggttcactgaaagggaaaccacatggaagtcattgggacttgaggaggatgtacatagcctaggactgtgtgtgtgacttctgcagtggtgactcaaggaccaagcttgtgtataagcatgtaaatatatgccttaattcacaattgagaatgaagggtcaataagctagatgtttaaaagaatgattgtttccacaaattaatgttaacactcaagtgtttggatttcagtattggggtgattcaattggggacaatgccaaataaaatgaaggagtggaactcctt

SEQ ID NO: 921 - DNA, 1039 bp, Rattus norvegicus
  Genbank Accession No. NM_017147
gaaacatggcctctggtgtggctgtctctgatggagtcatcaaggtgttcaatgacatgaaagttcgcaagtcttcaacgccagaagaagtgaagaaacgcaagaaggcagtgctcttttgcctgagtgaggacaagaagaacatcatcctggaggagggcaaggagattctggtaggagatgtggggcagactgtggacgacccctacaccacttttgtcaagatgctgccagacaaggactgccgctatgctctctatgacgcaacctatgagaccaaggagagcaagaaggaggacctggtattcattttctgggcccccgagagtgcaccccttaagagcaaaatgatctatgccagctccaaggatgccatcaagaagaaactgacaggaatcaagcacgaattacaagctaactgctacgaggaggtcaaggaccgctgcaccctggcagagaaactaggtggcagcgccgtcatttccctggagggcaagcctttgtgagccacctccagccccctgcctggagcatctagcagccccagacctgctcttgggtgttgcaggctgcccttttcctgccagaccggaggggctgggggggttccagcagggggagggttttcccttcaccccagttgccaaacatccctcccaccccctggaccgtccttttccctccatccctgacggttctggccttcccaaactgcttttgatcttctgattcctcttgggttgaagcagaccaagtcccgtcctaggcacccagtttggggggagcctgtatttttttttttaacgacacccctactcctgatctgtcccatcccatgctgccaacttctaaccacaatagtgactctgtgcttgtctgtttagttctgtgtgtaaatgaactgtggaaatgaccctccctgcaccagctggttgccctcccctttccctttgatcttggccactcatggaagcaggaccagtaagggaccttcaatttaaaaaaaaaaaaaaacacaataaaaaggctaattaacaaa

SEQ ID NO: 922 - DNA, 1403 bp, Rattus norvegicus
  Genbank Accession No. NM_017148
gctgtcgcccgtgcgcctcctagcagctgccagaatgccaaactggggaggaggcaagaaatgcggggtgtgccagaagacagtctactttgctgaggaggtccagtgcgagggcaacagcttccacaaatcctgcttcctgtgcatggtttgcaagaagaatctggacagcaccactgtggcagtgcatggagaagagatctattgcaagtcatgttatggcaagaagtatggaccaaaaggctacggctacgggcagggtgcaggcacgctgagcatggacaagggggagtctctgggcatcaagcatgaggaagcccccggacacaggcctaccaccaaccccaatgcatccaagtttgctcagaagatcggcggctctgagcgctgtccgcgatgcagccaggcagtctatgcagcggagaaggtgatcggtgccgggaagtcctggcataagtcctgcttccgatgtgccaaatgtggcaaaggcctcgagtcgaccaccctggcagacaaggatggtgagatctattgcaaaggatgctatgccaaaaactttgggcccaaaggttttggctttggacaaggagctggcgccttggtccattcagagtgaggctgccgctgcgtaccctgcctactcctgcactctcataagcagtccgttcctggaagccatggacacctccaagatcctctctctcactcagccctgctgcacatcactaatgccttggacttgggtgttctttggcttaggggtctgcctgagttccttccccactaagggcttcctcctgcctggcattcgatacccttatctttaggagacatctgtctagtcaccccttcccagataccaggtccctctcccccacaccttacccctacagacctctgtggccaggacactctctactggccaggacacctgaccccacatctttggagcccaaaagagcaaggcggaagacctgcgctagggaaggctgtggtctattgtatccagagtctctctctgggtaggatgctgagcttcttggtgcctctcagtctggaagtccccgtgagaggcagagaggtgcggataggattgtggggtcatcagaaggagcttgttctctgacctcttgcctttgaatgtggaaataataacttttcacttagggatgaagaagaacgcaggtcagaggaccccaaaatctagaggttgcctgacctcaagttccctgttccatgggcaagggagagcctaatgcataccttgaacaaggcattgacatggatcagtggtccagatcttagagtggtcagttctggttctaagcttgggtctggtggctgggatggacagcttctgttgcagcatagcccagggtagagctgtgttctagccactcctg

SEQ ID NO: 923 - DNA, 4198 bp, Rattus norvegicus
  Genbank Accession No. NM_017154
agagctcagtgactccagcagccacgatgactgcggatgagttggtcttctttgtgaatggcaaaaaggtggtggagaaaaatgcggaccctgaaacaacacttctggtctacctgagaagaaagttggggctatgtgggaccaagcttggctgtggagaaggtggctgtggggcatgcaccgtgatgatctccaagtatgaccgtcttcagaacaagattgttcatttttctgtcaatgcctgcttggctcccatctgctccttgcaccatgttgctgtgaccaccgtggaaggcataggaaacacccagaagctgcatcctgtacaggagagaattgccagaagccatggttcccagtgtgggttctgcactcctggcattgtcatgagtatgtacacactgctccggaaccagcctgagcctactgttgaggagatcgagaatgccttccaaggaaacctctgtcgctgtacaggctacagacccatcctccagggattccggacctttgccaaggatggtgggtgctgtggagggagtggaaacaacccaaactgctgtatgaaccagacgaaagaccaaacggtttctctctcaccttctttattcaacccagaggatttcaaacctttagatcccacgcaagagcccatcttccccccagagttgctgaggctgaaagacactccccagaagaagctgcgttttgaaggggaacgtgtgacctggatccaggcttcaactatggaggagctgcttgacctgaaagctcagcaccctgatgccaagctggtggtgggaaacacagagataggcattgaaatgaaatttaagaatatgctatttcctctgatcgtctgcccagcctggatccctgaactgaattcagtggtgcatgggcctgagggaatctccttcggagcttcttgcccccttagcttggtggaaagtgtcctggcggaggagattgctaaacttccagagcaaaagacagaggtgttcagaggcgtgatggagcagctgcgctggtttgccggcaagcaggtcaagtccgtggcgtccatcggagggaacatcatcactgccagccccatctctgacctcaaccctgtgttcatggccagtggagccaagctgactctggtgtctagaggtaccaggagaactgttcggatggatcataccttcttccctggctacagaaagactctgctcagaccagaggagatattgctgtccatcgagatcccctatagcaaggagggagagtttttctcagccttcaagcaggcctccaggagggaagatgacattgccaaggtgactagtggcatgagagtcctgttcaaaccggggaccattgaagtgcaggaactgtccctttgcttcggagggatggccgacagaactatctcagccctcaagaccactccgaagcagctatcgaagtcctggaatgaggagctgctgcagagcgtgtgtgccggcttggcagaggagctgcagctggcccccgatgcccctggtggtatggtggaattccggcgcaccctcaccctcagcttcttcttcaagttctacctgacagtgctccagaagctgggcagagcggaccttgaggatatgtgtggtaaactggaccccacctttgccagtgccaccctgctctttcagaaggaccctccagctaatgtccagcttttccaagaggtgccaaaggatcagtctgaggaggacatggtgggccggcccctgcctcacctggcggcaaacatgcaggcatcgggagaggccgtgtactgtgatgacattccccgctatgagaatgagctctctctcaggctggtcaccagcacccgggcgcatgctaaaatcacgtccatcgacacttcagaagccaagaaggtgccagggtttgtttgcttcctcaccgcagaggatgtccctaatagtaatgcaaccggccttttcaatgatgaaactgtctttgcgaaggatgaggttacttgtgttgggcacatcattggtgctgtggtcgctgacaccccagaacacgcacagagagctgcgagaggggtgaaaatcacctatgaagatcttccagccattatcacaatccaggatgctataaacaacaactccttttatggctctgagataaaaattgagaaaggagatctcaagaaaggcttttcagaagctgacaatgttgtctcaggagagttgtatatcggtggccaggagcacttctacctggagaccaactgcaccattgccgtgccaaaaggcgaggcaggcgagatggagctgttcgtgagcacacagaacaccatgaaaacccagagctttgttgcaaaaatgttgggcgttccggacaacagaatcgtagtccgagtgaagaggatgggtggaggctttggagggaaggagacccggagcactgtggtgtccacagcactggccttggctgcacacaagactggccggcccgtacgttgcatgttggaccgagatgaggacatgctgataactggtggcagacatcccttcctggctaaatacaaggttggcttcatgaagactgggactgtagtggctctcgaggtggctcacttcagcaatggtggtaacactgaggatctctctcggagtataatggaacgagctttgttccacatggataacgcctataagatccccaacattcgaggcactgggaggatttgcaagactaatctgccctccaacacagccttcagaggttttgggggtcctcaggggatgctaatcgcagaatactggatgagcgaggtcgccataacctgtgggctgcctgcagaggaggtacggaggaaaaacatgtacaaagaaggggacctgactcacttcaaccagaagctggaggggttcaccttgcccaggtgctgggatgaatgcatcgccagctctcagtatcttgctcgcaagagggaagtggagaaattcaacagggagaattgttggaaaaagagagggctgtgtataatcccaactaagtttggaataagctttacacttccttttctgaaccagggaggcgctctggttcacgtgtacactgatggttcggtgctgttgacccatggagggactgagatgggccaaggccttcacaccaagatggttcaggtggccagcagagctctgaaaatccccacctccaagattcatataagtgagacaagcactaacaccgtccccaacacttctcccacagctgcctctgccagtgctgacctcaatggacagggtgtttatgaagcatgccagaccatactgaaaaggctggaacctttcaagaagaagaaacccaccggcccctgggaggcatgggtgatggacgcctatacgagcgcagtgagtttgtccgcaactggattttataagacacccaaccttggctacagctttgagacaaactccggaaatcccttccactatttcagttatggggtggcttgctctgaagtagaaattgactgcttaacaggggatcataagaatctccgtacggatatcgtcatggatgttggttccagcttgaatcctgccattgatattggacaagtagagggggcatttgtccagggccttggtctcttcactatggaggagctgcactactcccctgaggggagcctgcatactcgtggccccagtacctacaaaatccctgcatttggtagcatccccattgagttcagagtatccctactccgggactgccccaacaagagggccatctatgcatccaaggctgttggggagccacctcttttcctggcttcctctatcttctttgccatcaaagatgccattcgtgcagctcgagctcagcacggagataacgcaaaacaacttttccagctagacagccctgccactccggagaagatccgaaacgcctgtgtggaccagttcaccaccctgtgtgtcactggagtaccagaaaactgtaaatcctggtctgtgaggatctgaagagaaggtctccaccattggtttgtaccgcaccaggattccttggagccacaagcacatcctgtagtatccagatttccgcatgccgcgtgggactcagcaggatgacattttcaggaagatggacattttgacccaaataagagctgcaaacaaaccaataagcaaatggggag

SEQ ID NO: 924 - DNA, 801 bp, Rattus norvegicus
  Genbank Accession No. NM_017160
gtcggctgtgtcaagatgaagctgaatatctccttccctgccactggctgtcagaaactcatagaagtggatgacgaacgcaagcttcgtacgttctatgagaagcgcatggccacagaagtagctgctgatgctcttggtgaagagtggaagggttatgtggtccggatcagcggtgggaatgacaaacaaggttttcccatgaagcaaggcgttttgacccatggcagagtgcgcctgcttttgagtaaggggcattcttgttatagacctaggagaactggagagaggaagcgcaagtctgtccgaggatgcattgtggatgccaacctgagtgttctcaacttggttattgtaaaaaaaggagagaaggatattccaggactgacagataccactgtgcctcgtcggttgggacctaaaagagctagtagaatccgaaagctttttaatctctccaaagaagatgatgtccgccagtatgttgttagaaagcccttaaacaaagaaggtaagaagcccaggaccaaagcgcccaagattcagcgtcttgttactccccgtgtcctgcaacacaaacgccgacgtattgctctgaagaagcaacgcactaagaaaaacaaggaggaggctgcagaatatgctaaacttttggccaagagaatgaaggaagccaaagagaagcgccaggaacagattgccaagagacgtaggctgtcttcgctgagagcttctacttctaaatctgagtccagtcaaaaataagtctttaaagagtaacaaataaataatgagaccttg

SEQ ID NO: 925 - DNA, 2336 bp, Rattus norvegicus
  Genbank Accession No. NM_017163
tcccagccattcccagggtgacgactcagcatggctcaggcctcagggatggacccacttgtggacatcgaggacgagagacccaaatgggacaacaaacttcagtacctcctgagctgcatcggctttgctgtggggctggggaacatatggcggttcccctacctgtgccatacccacgggggaggggccttcctcatcccctacttcatcgccctggtctttgaggggatcccgcttttctacattgagcttgccattggccagcgcctacggaggggaagcattggcgtatggaagaccatctccccctaccttggtggagtaggcctgggctgcttctcagtgtccttcctggtcagcctgtactacaacaccattctcctgtgggtcctgtggttcttcctcaactccttccaacacccactgccctggagcacatgcccattggatctcaacagaacaggatttgtgcaggaatgccagagcagtggcaccgtgagctacttctggtaccggcagactttgaatattacgtctgacatcagcaacacaggcactatccagtggaagctgtttctctgcctggtggcctgctggacaactgtgtacctgtgtgtcatcagaggcattgagagcacggggaaggtgatctactttacagccctatttccttacctggtgctaaccatcttcctcatcagaggtctgactctgcccggagcaacagagggcctaacttacctgtttactcccaatatgaagattcttcagaattcacgggtgtggttggacgcagccacccagattttcttctccctgtccctggccttcggagggcatattgctttcgcaagttacaatcaacccaggaacaattgtgagaaggacgccgtgactattgccctggtcaacagcatgacctccctgtatgcatccatcaccatcttttccatcatggggttcaaggcatccaatgactatgggaggtgcctggacagaaatattttgagcctcatcaatgagttcgactttccagagcttagcatctccagggatgagtacccatctgtcctcatgtacctgaatgccactcagcctgagagggtggcccgacttcccctgaagacctgccatctggaagatttcctggataagagtgcctcgggcccgggcctggccttcatcgttttcacagaagctgtcttgcacatgcccggagcttctgtgtggtctgtgctcttctttgggatgctgttcacactgggcctgtcgtccatgtttgggaacatggagggtgtcatcacaccactatttgacatggggatcttacccaaaggtgtacccaaggagaccatgaccggggtggtctgctttatctgtttcctctcagccatttgcttcacactgcagtctggaagctactggctggagatctttgacagttttgcagcttctctgaatctgatcatcttcgccttcatggaggtggtgggcgtcattcacgtttatgggatcaagcggttctgtgatgacattgagtggatgactgggcggcggcccagcctgtactggcaggtgacatggagggtggtgagccctatgctgctgtttggcatcttcctgtcctacattgtccttctggctcagtcatcacccagctacaaggcctggaacccccaatatgaacattttccctcaagagaggagaagctctatccaggctgggtacaggttacctgtgtgctcctgtccttcctgccctcactgtgggtccctggaattgctctggctcagctactgttccagtacagacagaggtggaagaacacacatctggaaagtgctctgaagccacaggagagcagaggctgctgagacagagccagggtagatcagggttgggaggaagacctgtgccactccgatgcagcctcattacactctgtctacgactgagaccacgtgattattgctttcctagctttccgtatagtggaagactcatagattcagggcaattgtgtattgcccagtggatgtctgtgtgatgccattcctctgaagctaggtccacagggtgccgtctgcatggacatggcttttccctagaatccatgcagatttgggttgtcccgagtgtacttcattggcacagtggcaagactgtggaaaccttttctctgaatggccttggcattactaattttagaaatccagccctatgctggtcttcaaagaaaagctggaacctgacaggtgggaaacttcttcctcctcccatattatcctggtgttaccatgtctataaagagaccctcgggtgcagataccag

SEQ ID NO: 926 - DNA, 2063 bp, Rattus norvegicus
  Genbank Accession No. NM_017173
agcggacgctgtctgaggagtagagcctgcctgagagcgagtgtcccgtcggtcccggagcagcccagcccggcccagccctcacaggtcctctgtggtgcacacagcccacctcccagccatgcgctctctccttctgggcaccttatgcctcctggctgtggccctggcagccgaggtgaagaaacctgtagaggccgcagcccctggtactgcggagaagctgagttccaaggcgaccacactggcagagcgcagcacaggcctggccttcagcctgtatcaggcaatggccaaagatcaggcggtggagaatatcctcctgtcacccttggtggtggcctcatccctgggccttgtgtcactgggtggtaaagccaccacagcttcgcaggcgaaggcagtgttgagcgctgagaagctgcgggatgaggaggtgcacacggggctgggcgagctcgtgcgctccctcagtaactccactgcgcgcaatgtgacctggaaactgggcagccgcctgtacgggcccagctccgtgagcttcgccgatgacttcgtgcgcagcagtaagcaacactacaactgtgaacactccaagatcaacttccgagacaagcgcagcgcgctgcagtccatcaacgagtgggcctcgcagaccaccgacggcaagctgccagaggtcaccaaggatgtggagcgcacggatggggcactgctcgttaatgccatgttctttaagccgcactgggatgagaagttccaccataagatggtagacaaccgtggcttcatggtgacccgctcctacactgtgggtgttacgatgatgcaccggacaggcctctacaactactatgacgacgagaaggagaagctgcagctggtggagatgcccttggcccataagctctccagcctcatcatcctcatgccccaccacgtagaaccgctcgagcgcctggagaagttgctgaccaaggagcaactaaagacctggatggggaagatgcagaagaaggctgttgccatctccctgcccaagggagtggtggaggtgacccatgacctgcagaaacatctggccggactgggcctgactgaggccatcgacaagaacaaggcagacttatcgcgcatgtctggcaagaaggatctgtacctggccagtgtgttccacgccactgccttcgagtgggacacagagggcaacccctttgaccaggacatctacgggcgtgaggagctgcgcagccccaagctgttctatgccgaccaccccttcatcttcctggtgcgagataatcagagcggctccttgctgttcattggccgcctggtccggcccaagggagacaagatgcgagacgagttgtagagtccaagagtggtcgtggcgtggcatggcgggaagtagccagaggttcctgagacacatgggtgctattgtggggggagggggaggcaccaaccctggatagtccacgggtgggggggggttggcagtgcagatcggaattcccataggtctgagtaggtatttttagacaagagtccactccgttagacatggagcccagacactatgagaccaaattcaggggtgtcacagccattctagccctgccccacaagttttatatccaatctagcctcaacagtcaatcagtgttcatattcgtggccaagcattctgtctgtgagacaatcgagttgggtgggggtagggcggcctagcctctctgtcaccatgccctgagccctcggttttcctgttcacctctgattccctttaaccacaaaactaggagcctgtggtcccagaactgcccacccttaaaatcgattctttgccgcagcagtgggagttggggagaccatgcataggagggctccttggcatatccggccctagagccattacattacattgacaactcaactttgcttctgttttctccctttttgagtttttcaaggaatgggggtttggggaaggggaagcctttattgctttcaaaacaagaacagtttgtcaattttttttgaataaaccttttccaatg

SEQ ID NO: 927 - DNA, 1679 bp, Rattus norvegicus
  Genbank Accession No. NM_017177
gactgataggcgtgtcgggcgggaccagagcgcgccccactcagcgaaagctgccgtccctctttgccttgagcgccgcagccctgagaatcgcatctggcttggaaacagtcctaagactggagtctcgaagaaagccggagacagtcgcgaagaacggaggacgcccagagactcttcggcttcccggaagtggaaccgagcatacccggaaggagctaatcccacctgaagattgctgagcacccgcaggcgttaagcctaacggagtccacgtcatggcggcggatgggacaggtgtagtcggaggaggggctgtcggcggccccctgtccaaggacggtttgctggatgctaagtgcccagaaccaatccccaatcggcggcgctcttcctcgctgtcccgtgacgcgcagcgccgagcctatcagtggtgccgggagtacctgggcggagcctggcgcagagcgcggccggaggagctgagcgtttgccccgtgagcggaggcctcagcaacctgctcttccgatgctcgctaccgaaccacgtgcccagtatgggcggggagccccgggaggtgctgctacggctgtacggggctatcttgcagggtgtagactccttggtattagaaagcgtgatgttcgccattcttgcagagagatctctagggccccaactttatggagtgtttccagagggccgcttggaacagtacctcccaagccggccattgaaaactcaagagctccgggacccagtgttgtcaggagccattgcaacaaagatggcccgtttccatggtatggagatgcccttcaccaaggagccccgctggttgtttgggaccatggagcggtacctaaagcagatccaggacctgccgtccactagccttccccagatgaacctggtggagatgtacagcctcaaggatgagatgaatcacctcaggacgttgctagacgctacaccgtccccagtggtcttctgccacaatgacatccaggaaggaaacatcttactgctctcagagccagacagtgatgacaacctcatgttggttgatttcgagtacagtagttacaactacaggggctttgacattgggaatcatttctgtgagtgggtttacgattacacttacgaggagtggcctttctacaaagcaagacctgcagactaccccactagagaacagcagctccttttcatccgtcattatctggcggaggttcagaaaggtgaggtcctctccgaagaggagcagaagaaacaggaagaagatttgctgatagagatcagccggtatgccctggcctctcatttcttctggggcctatggtccaccctccaggcttccatgtccactatagagtttggctacttggaatacgcccaatctcggttccagttctacttccagcagaaggggcagctgaccagcttcctatcaccttgaggatccaacccccacctcagatttctcctggagcctccggggcaggccctcggagggaggggcaaagagcagaagcccccagagcttgggctgtgcctctaagtgagactgtcgttgaagtagctgacctccgtactcctttcttagtacttgcccaaggggggcatctgacagcccctggggctgtgcacctaaataaatgaacttcacaaatac

SEQ ID NO: 928 - DNA, 1353 bp, Rattus norvegicus
  Genbank Accession No. NM_017180
gagcgcctctcggagctgggttttcccccgcggcgcgggagccaggagccgccttttccgctgggtgtcactcgggggtggggagggtggcccattgaaaagcgctgcgaggggccccggccagtgcccttcagtgagcgctccgcggaagacggcagagagcagcccgctcacggctccgggatcttgtggcgggtcaggactcgcctgtccctctgccgggaccccgagccaccgccgccaccgccaccgctctgtctcctgcgagtcagccttctctgtgcgctccgggcaggcggccgcggaagccgctggagcgaggacagcgcacggctgctactgctacccccagccggagcgtctggaagcctaaaggccgagcggagcagcagcaccccttatgccggaaggatgctggagagcagcggttgcaaggcgctgaaggaaggagtgctggaaaagcgaagcgacgggctgctgcagctctggaagaaaaagtgctgcatcctcactgaggaagggctactgctcataccgcccaagcaggtacaacatcagcagcagcaacagcagcagcaacagcccgggcaggggacagccgaaccgtcccaacctagtggccccgccgtcaccagccttgagccaccagccaagctgaaggaattgcacttttccaatatgaagactgtagactgcgtggagcgcaagggcaagtatatgtacttcactgtggtgatggcggagggcaaagagatcgactttcggtgtccccaggaccagggctggaacgcagagatcacgttgcagatggtgcagtacaaaaatcgtcaggccatactggcggtcaagtctacgaggcagaagcagcagcacctggtccagcagcagcctccgcagacgcagcagatccaaccccagccccagcagccgcagatccaaccccagccccagccgcagatccagcctcaaccccaaccccaaccccaacctcagccccaaccccagcagcagccccagccccaacagctccactcctacccgcacccgcatcctcatctttaccctcaccctcaccctcacgcgcactcgcacccgcacccgcaccctcaccctcatccacaccaactccagcatgcgcaccagcctctccactcgcagccacagggccaccggcttctccgcagcacctccaactctgcctgaagagggcggcacccgggccactcaaggttttgaggacttcgggaagtgggaagagtgcattactatttaagttcacttggatcaaaaccaacggaggtctccccgccctgtgccagatcaagtagtttggacatcaccctacggataacg

SEQ ID NO: 929 - DNA, 1386 bp, Rattus norvegicus
  Genbank Accession No. NM_017181
ctgctgcccagtgctcttcagcatgtcctttattccggtggccgaggactccgactttcccatccaaaacctgccctatggcgttttctccactcaaagcaacccaaagccacggattggtgtggccatcggtgaccagatcttggacctgagtgtcattaaacacctctttaccggacctgtcctctccaaacatcagcatgtcttcgatgagacaactctcaatagctttatgggcctcggccaagcggcatggaaggaggcaagagcatctttacagaacttactgtctgccagccaagcccagctcagagatgacaaggagcttcggcagcgtgcattcacctcccaggcttctgccacgatgcaccttcctgctaccataggagactacacggacttctactcctctctgcagcatgccactaacgttggcattatgttcaggggcaaggagaatgcgctgttgcccaattggctccacttacctgtgggataccatggccgagcttcctccgttgtggtgtctggtaccccaattcgaagacccatgggacagatgagacctgataactcaaagcctcctgtgtacggtgccagcaaacgcttagacatggagttggaaatggctttctttgtaggccctgggaacagattcggcgagccaatccccatttccaaggcccaggagcacattttcgggatggtcctcatgaacgactggagtgctcgagacatccagcaatgggagtacgtcccccttgggccattcctggggaaaagttttggaaccaccatctccccatgggtggtgcccatggatgctctcatgccctttgtggtgccaaacccaaagcaggaccctaagcccctgccatatctctgccacagccagccctacacatttgatatcaacctgtccgttgctttgaaaggagaaggaatgagccaggcagctaccatctgcaggtccaactttaagcacatgtactggaccattctgcagcaactgacacaccactctgttaatggatgcaatctgagacctggggacctcttggcttctggaaccatcagtggatcagaccctgaaagctttggctccatgctggaactgtcctggaagggaacaaaggctatcgatgtggggcaggggcaaaccaggacctttcttctggacggagatgaagtcatcataacaggtcactgccagggggatggctaccgtgttggttttggccaatgtgctgggaaagtgctgcctgccctctcgccagcctgaagctccagaatccacagaacacagccttgccttgtgaggatcatactgcaactgcatgagtcaggaatgaataaagctattttgattggggaaaaaaaaaaaaa

SEQ ID NO: 930 - DNA, 1072 bp, Rattus norvegicus
  Genbank Accession No. NM_017187
ggcacgagggaaggaagtctctctgtggaggtctgagggaagagctcgcgccaggtagacgctgcgccgtcatcatgggcaagggggaccccaacaagccgcggggcaagatgtcctcgtacgccttcttcgtgcagacctgccgggaggagcacaagaagaagcatcccgactcgtcggtcaacttcgccgagttctcgaagaaatgttcggagagatggaagaccatgtctgccaaggaaaagtcgaagtttgaggatttggccaagagcgacaaagctcgttatgacagggagatgaagaactatgttcctcccaaaggtgataagaaaggaaagaaaaaagatccaaatgctcccaagagaccaccgtctgccttcttcctgttttgctctgaacatcgcccaaagatcaaaagtgaacaccccggcctgtctattggagatactgcaaagaaactgggggagatgtggtctgagcaatctgccaaagataaacaaccgtatgagcagaaagcagctaaactaaaggagaagtatgaaaaggatattgctgcataccgtgccaagggcaaaagtgaagtaggaaagaagggtcctggtaggccaacaggctcaaagaagaagaatgaaccagaagatgaggaagaggaggaggaggaagaagatgatgaagatgaagaggaggaagatgaggatgaagaataagtatctgtcctaaagtgtggagtatatgtgctcaggcaattattttgctaagaatgtgaaattcaagtgcagctcaacattagcttcagtataaaaactgtacagatttttgtatagctgatgagattctttgtagagaaaatactttttaaaaagggtttgtagctttttcaggggctacaacgtacagttagatttaaagcttttgatgttgaatgtttctaaatatttaatggtttctttaatttcttatgatagcaaaaaaaaaaacttcataggaatttctattaccagtaaaagaattttttttttaggatgttgcatttttgtttttttttaaaatttgtaataaaataatgtatatt

SEQ ID NO: 931 - DNA, 2474 bp, Rattus norvegicus
  Genbank Accession No. NM_017190
cagaagccagaccatccaaccttctgtatcagtgctcctcgtcgcctcactgtacttcacggaagagacttggttgactggccacttggagcggaatcaggagacattcccaactcagggagactgaggtgagggccctagctcgcccacttgctggacaagatgatattccttaccaccctgcctctgttttggataatgatttcagcttctcgaggggggcactggggtgcctggatgccctcgtccatctcagccttcgagggcacgtgtgtctccatcccctgccgtttcgacttcccggatgagctcagaccggctgtggtacatggcgtctggtatttcaacagtccctaccccaagaactacccgccagtggtcttcaagtcccgcacacaagtggtccacgagagcttccagggccgtagccgcctgttgggagacctgggcctacgaaactgcaccctgcttctcagcacgctgagccctgagctgggagggaaatactatttccgaggtgacctgggcggctacaaccagtacaccttctcggagcacagcgtcctggacatcatcaacacccccaacatcgtggtgcccccagaagtggtggcaggaacggaagtagaggtcagctgcatggtgccggacaactgcccagagctgcgccctgagctgagctggctgggccacgaggggctaggggagcccactgttctgggtcggctgcgggaggatgaaggcacctgggtgcaggtgtcactgctacacttcgtgcctactagagaggccaacggccaccgtctgggctgtcaggctgccttccccaacaccaccttgcagttcgagggttacgccagtctggacgtcaagtaccccccggtgattgtggagatgaattcctctgtggaggccattgagggctcccatgtcagcctgctctgtggggctgacagcaacccgccaccgctgctgacttggatgcgggatgggatggtgttgagggaggcagttgctgagagcctgtacctggatctggaggaggtgaccccagcagaggacggcatctatgcttgcctggcagagaatgcctatggccaggacaaccgcacggtggagctgagcgtcatgtatgcaccttggaagcccacagtgaatgggacggtggtggcggtagagggggagacagtctccatcctgtgttccacacagagcaacccggaccctattctcaccatcttcaaggagaagcagatcctggccacggtcatctatgagagtcagctgcagctggaactccctgcagtgacgcccgaggacgatggggagtactggtgtgtagctgagaaccagtatggccagagagccaccgccttcaacctgtctgtggagtttgctcccataatccttctggaatcgcactgtgcagcggccagagacaccgtgcagtgcctgtgtgtggtaaaatccaacccggaaccctccgtggcctttgagctgccttcccgcaacgtgactgtgaacgagacagagagggagtttgtgtactcagagcgcagcggcctcctgctcaccagcatcctcacgctccggggtcaggcccaagccccaccccgcgtcatttgtacctccaggaacctctacggcacccagagcctcgagctgcctttccagggagcacaccgactgatgtgggccaaaatcggccctgtgggtgctgtggtcgcctttgccatcctgattgccattgtctgctacatcacccagacaagaagaaaaaagaacgtcacagagagccccagcttctcagcgggagacaaccctcatgtcctgtacagccccgaattccgaatctctggagcacctgataagtatgagagtgagaagcgcctggggtccgagaggaggctgctgggccttaggggggaacccccagaactggacctcagttattcccactcagacctggggaaacgacccaccaaggacagctacaccctgacagaggagctggctgagtacgcagaaatccgagtcaagtgaggaagctgggggctggccctgtggctcaccccccatcaggaccctcgcttggcccccactggccgtgggctccctttctcttgagagtggtaggggtgggggcgggaaggggcggggcaggaaacagtgaggtcttaggggcccggcctcccctccttcccggctgctcctctctgccaacatcctgcacctatgttacagctccctctcccctccttttaacctcagctgttgagaggggtgctctgtctgtccatgttatttattgttatcctggtctcctgtccccttacccggccccaggacctgtacaaaagggacatgaaataaatgtcctaatgacaagtgccagtctagacccatcctttggaggaaaggggcatattagtaatacttttctcgttgctgtaacaaaatactggacaaaaaca

SEQ ID NO: 932 - DNA, 1828 bp, Rattus norvegicus
  Genbank Accession No. NM_017193
gtggcactccgcagcactacccggagacagctaacagtgcagcccgagtgatctgggaagccgttctcagtgaccgacttttctagtcctgttccacgcgaccagcagagacatgaattactcaaggttcctcactgcaacgagcctggccagaaagacatcccctatcagagctacagtggagataatgagtagagcacccaaagacatcatctccctggctcctggatctccgaacccgaaagtgttcccctttaagtcagctgtcttcactgtggagaacggaagcaccatccggtttgaaggagagatgtttcaaagggccctccaatattcctcaagctatggaattccagaacttctgtcctggctaaaacagttgcaaataaaattgcataatcctccgactgtcaactactcacccaacgaaggacagatggacctctgcatcacatctggctgtcaagacggtctctgtaaggtgtttgaaatgctcatcaatcctggagacactgttctggtcaatgaaccactgtattcaggagccctttttgcaatgaaaccactgggctgcaattttattagtgtccccagtgatgactgtgggattattccagagggtctcaaaaaagtactttcccagtggaaaccagaagattccaaggatcccacaaaaaggactccaaaatttctgtatactattccgaatggcaacaaccctacaggcaactcgttgactggtgaccgcaagaaagaaatctatgagcttgcaagaaaatatgacttcctcataatagaagacgatccttactattttctccagttcaccaagccttgggaaccaacctttctctccatggatgttgatgggagagttatcagagctgactccctttcaaaagttatctcctcagggctgagagtggggtttataactggccccaagtccttgatacagaggattgttctccacacacaaatctcatcactgcatccctgtactttatcacagctcatgatatcggagcttctataccagtggggagaagagggtttcctggcccatgttgacagagctattgatttctacaagaaccagagggattttatattggcagctgcagacaagtggttacgtggtttggcagagtggcatgttcccaaagctggcatgtttctatggattaaagttaacggaatctctgatgcaaaaaaactaattgaagaaaaggctattgaaagagagatcttgttagttcctggaaatagtttcttcgtcgataattcagccccctcctccttcttcagagcatccttctctcaggttactccagcgcagatggacttagtcttccagagattggcccaactcataaaagacgtttcataaagaaatcaaactcagcattgaacttataattttaaaataaatttcctatactttgctgaagaaatggctgacaggatggatccagtttgtgaaatatctgtggcaatttcactgaacaactttgaagccccttaaaatccaccgcattgccaaaataactttctgatatacttttgccctttgattaattatgaactaacaaaacatcaaatttcattgttaaagacctctgtagctgcttaataatgtccaataaatttttttgagcctaacatagactaactaacatagtaaattgcaagggaattagttaaaatggcctataatatgcaggtttttttctactttaaggaaatttcatgagcatttactgcaaaaattgttgtaatttgacaattataaattactttgtaaccgaaaaaaaaaaaaaaaaaaaaa

SEQ ID NO: 933 - DNA, 5240 bp, Rattus norvegicus
  Genbank Accession No. NM_017212
cctcccctggggaggttcgcgttcccgtggctcgcgcctgctgcccgccggcctcgagaacgcgctctctcggccgcggcgctcacagtctccgccacccaccagctccagcaccagcagcagcgccggcgccaccgcccaccttctgctgtcgccgccgccacaaccaccttcccctccgctgtcctcttctgtcctcgcctcctgtcgattatcaggctttgaagcagcatggctgaaccccgccaggagtttgacacaatggaagaccaggccggagattacactatgctccaagaccaagaaggagacatggaccatggcttaaaagctgaagaagcaggcatcggagacaccccgaacatggaggaccaagctgctgggcatgtgactcaagctcgagtggccggcgtaagcaaagacaggacaggaaatgacgagaagaaagcgaagggggccgatggcaaaacgggggcgaagatcgccacacctcggggagcagccactccgggccagaaaggcacatccaatgccaccaggatcccagccaagaccacacccagcccaaagactcctccaggatcaggtgaaccaccaaaatccggagaacgaagcggctacagcagccccggctcgcccggaacccctggcagtcgctcccgtaccccatccctaccaacgccgcccacccgagagcccaaaaaggtggcagtggttcgcactccccctaagtcaccgtctgccagtaagagccgcctacagactgcccctgtgcccatgccagacctaaagaacgtcaggtccaagattggctccactgagaacctgaagcaccagccgggaggcggcaaggtgcagataattaataagaagctggatcttagcaacgtccagtccaagtgtggctcaaaggacaatatcaaacacgtcccgggcggaggcagtgtgcaaatagtctacaagccagtggacctgagcaaggtgacctccaagtgtggttccttagggaacatccatcacaagccaggaggtggccaggtagaagtaaaatcagagaagctggacttcaaggatagagtccagtcgaagattggctccttggataacatcacccatgtccctggaggagggaataagaagattgaaacccacaagctgaccttcagggagaatgccaaagccaagacagaccatggagcagaaatcgtgcacaagtcacctgtggtgtctggggacacatctccacggcacctcagcaacgtctcctccacgggcagcatcgacatggtggactctccacagcttgccacgttagccgatgaagtgtccgcctctttggccaagcagggtttgtgatcaggcccctggggccgtcactgatcatggagagaagagagagtgagagtgtggaaaaaaaaaaaaaaagaatgacctggcccctcaccctctgccctccccgctgctcctcatagacaggctgaccagcttgtcacctaacctgcttttgtggctcgggtttggctcgggacttcaaaatcagtgatgggaaaaagtaaatttcatctttccaaattgatttgtgggctagtaataaaatatttttaaggaaggaaaaaaaaaacacgtaaaaccatggccaaacaaaacccaacatttccttggcaattgttattgaccccgcccccccctctgagttttagagggtgaaggaggctttggatagaggctgcttctggggattggctgagggactagggcaactaattgcccacagccccatcttaggggcatcagggacagcggcagacatgaaagacttgggacttggtgtgtttgtggagccgtaaggcgtatgttaactttgtgtgggtttgagggaggactgtgatagtgaaggctgagagatgggtgggctgggagtcagaggagagaggtgaggaagacaggttgggagagggggcattgcgtccttgccaaggagcttgggaagcacaggtagccctggctgcagcagtcttagctagcacagatgcctgcctgagaaagcacagtggggtacagtgggtgtgtgtgccccttctgaagggcagcccatgggagaaggggtattgggcagaaggaaggtaggccccagaaggtggcaccttgtagattggttctctgaaggctgaccttgccatcccagggcactgctcccaccctccaggaggaggtctgagctgaggagcttccttttcgatctcacaggaaaacctgtgttactgagttctgaagtttggaactacagccatgattttggccaccatacagacctgggactttagggctaaccagttctttgtaaggacttgtgcctcttgcgggaacatctgcctgttctcaagcctggtcctctggcacttctgcagtggtgagggatgggggtggtattctgggatgtgggtcccaggcctcccatccctcgcacagccactgtatcccctctacctgtcctatcatgcccacgtctgccacgagagccagtcactgccgtccgtacatcacgtctcaccgtcctgagtgcccagcctcccaagcccaatccctggacccctgggtagttatggccaatctgctctacactaggggttggagtccagggaaggcaaagatttgggccttggtctctagtcctacgttgccagaatccaaccagtgtgcctcccacaaggaaccttacaaccttgtttggtttgctccatcaggcgtttggcgccatcgtggatggagtccgtgtgtgcctggagattaccctggacacctctgctttttttttttttactttagcggttgcctcctaggcctgactccttcccatgttgaactggaggcagccaagttaggtgtcaatgtcctggcatcagtatgaacagtcagtagtcccagggcagggccacacttctcccatcttctgcttccaccccagcttgtgattgctagcctcccagagctcagccgccattaagtccccatgcacgtaatcagcccttccataccccaatttggggaacataccccttgattgaaatgttttccctccagtcctatggaagcggtgctgcctgcctgctggagcagccagccatctcagagacgcagccctttctctcctgtccgcaccctgctgcgctgtagtcggattcgtctgtttgtctgggttcaccagagtgactatgatagtgaaaagaaaaagaaaaagaaaaaagaaaaaagaaaaaaaaaaaaggacgcatgttatcttgaaatatttgtcaaaaggttgtagcccaccgcagggattggagggcctgatattccttgtcttcttcgtgacttaggtccaggccggtcgagtgctaccctgctggacatcccatgttttgaagggtttcttcttcatctgggacccctgcagacactggattgtgacattggaggtctatacattggccaaggctgaagcacaggacccgttagaggcagcaggctccgactgtcagggagagcttgtggctggcctgtttctctgagtgaagatggtcctctctaatcacaacttcaagtcccacagcagccctggcagacatctaagaactcctgcatcacaagagaaaaggacactagtaccagcagggagagctgtggccctagaaattccatgactctccactactatccgtgggtcctttccaagccttgcctcgtcaccaagggcttgggatggactgccccactgatgaaagggacatctttggagacccccttggtttccaaggcgtcagccccctgaccttgcatgacctcctacagctgaaggatgaggcctttaaagattaggaacctcaggcccaggtcggccactttgggcttgggtacagttagggacgatgcggtagaaggaggtggccaacctttccatataagagttctgtgtgcccagagctaccctattgtgagctccccactgctgatggactttagctgtccttagaagtgaagagtccaacggaggaaaaggaagtgtggtttgatggtctgtggtcccttcatcatggttacctgttgtggttttctctgtatacccccatttacccatcctgcagttcctgtccttgaataggggtgggggtactctgccatatctcttgtaggcagtcagcccccaagtcatagtttggagtgatctggtcagtgctaataggcagtttacaaggaattctggcttgttacttcagtgaggacaatcccccaaggccctggcacctgtcctgtctttccatggctctccactgcagagccaatgtctttgggtgggctagatagggtgtacaatttgcctggaacctccaagctcttaatccactttatcaatagttccatttaaattgacttcaatataagagtgtatccatttgagattgcttgtgttgtggggtaaaggggggaggaggaacatgttaagataattgacatgggcaaggggaagtcttgaagtgtagcagttaaaccatcttgtagccccattcatgatgttgaccacttgctagagagaagaggtgccataaggctagaacctagaggcttggctgtccaccaacaggcaggcttttgcaaggcagaggcagccagctaggtccctgacttcccagccaggtgcagctctaagaactgctcttgcctgctgccttcttgtggtgtccagagcccacagccaatgcctcctcaaaaccctggcttccttccttctaatccactggcacatcagcatcacctccggattgacttcagatccacagcctacactactagcagtgggtaagaccacttcctttgtccttgtctgttctccagaaaagtgggcatggaggcggtgttaataactataggtctgtggctttatgagccttcaaacttctctctagcttctgaaagggttacttttgggcagtattgcagtctcaccctccgatggctgtagcctgtgcagttgctgtactgggcatgatctccagtgcttgcaagtcccatgatttctttggtgttttgagggtggggggagggacatgaatcatcttagcttagcttcctgtctgtgaatgtccatatagtgtactgtgttttaacaaacgatttacactgactgttgctgtacaagtgaatttggaaataaagttattactctgattaaacaaaaaaaaaaaaaaaaaaaaaaaaaaaaaaaa

SEQ ID NO: 934 - DNA, 1176 bp, Rattus norvegicus
  Genbank Accession No. NM_017220
cggtcccggaagccggaacccgtagcttgtgggtctttggtctgaagaccatgaacgcggcggttggccttcggcgccgcgcgcgattgtcgcgcctcgtgtccttcagcgcgagccaccggctgcacagcccatctctgagtgctgaggagaacttgaaagtgtttgggaaatgcaacaatccgaatggccatgggcacaactataaagttgtggtgacaattcatggagagatcgatccggttacaggaatggttatgaatttgactgacctcaaagaatacatggaggaggccattatgaagccccttgatcacaagaacctggatctggatgtgccatactttgcagatgttgtaagcacgacagaaaatgtagctgtctatatctgggagaacctgcagagacttcttccagtgggagctctctataaagtaaaagtgtatgaaactgacaacaacattgtggtctacaaaggagaatagatcttaggtttaatattgtagaaaagctaatttcttttcttactagaaaaagctctttgtccttttaaagtacacagcagtcatcacctacccgtgtctccatgttgtgttctggtgtgcctgagcgttaaagggattgtgaggtctgtatgtaaatgcattaagaagcaaattcgaagtgcatcctgagtgtattcttggtgagaaagcaggggagaactgaggattgaagcccgggcctcacacatgtgaaacatatactctgctccgacatgcatcccagtccgccaaggccgtttagaggatctttacctagagatagagattgttttatcttcagctggagagacagctcagtggttaggagcactgactgcttctccagaggtcctgagttcaaatccaccagacggtggtggctcacaaccatctgtaatgggatccgatgctctcttctggtgtgtaggtgtacatacagacaaagcattcctacatttaagaaaatacataaataagtttcaaaaattatttcatctggggctggggatttagctcagtggtagagcgcttacctaggaagcgcaaggccctgggttcggtccccagctccgaaaaaaagaaccaaaaaaaaaaaaattatttcatctgagcaaaatgttttgatgtggaattatgtaaaggtaaaataaac

SEQ ID NO: 935 - DNA, 1715 bp, Rattus norvegicus
  Genbank Accession No. NM_017221
ttaaaatcaggctctttttgtcttttaattgccgtctcgagacccaactccgatgtgttccgttaccagcgaccggcagcctgccatcgcagcccctgtctgggtggggatcggagacaagtcccctgcagcaacagcaggcaaggttatataggaagagaaagagccaggcagcgccagagggaacgaacgagccgagcgaggaagggagagccgagcgcaaggaggagcgcacacgcacacacccgcgcgtaccagctcgcgcacagaccggcgcggggacggctcgcaagtcctcaggttccgcggacgagatgctgctgctgctggccagatgttttctggtggcccttgcttcctcgctgctggtgtgccccggactggcctgtgggcccggcagggggtttggaaagaggcagcaccccaaaaagctgacccctttagcctacaagcagtttatccccaacgtagccgagaagaccctaggggccagcggccgatatgaagggaagatcacaagaaactccgaacgatttaaggaactcacccccaattacaaccccgacatcatatttaaggatgaggaaaacactggagcagaccggctgatgactcagaggtgcaaagacaagttaaatgccttggccatctccgtgatgaaccagtggcctggagtgaagcttcgagtgactgagggctgggatgaggacggccatcattcagaggagtctctacactatgagggtcgagcagtggacatcaccacgtctgacagggaccgcagcaagtatggcatgctggctcgcctggctgtggaggctggattcgactgggtctactatgaatccaaagctcgcatccactgctctgtgaaagcagagaactccgtggcggccaaatctgacggctgcttcccgggatcagccacagtgcacctggagcagggtggcaccaagttagtgaaggatctaagtcccggggaccgcgtgctggcggctgacgaccagggccggctgctgtacagcgacttcctcaccttcctggaccgcgacgaaggtgccaagaaggtcttctacgtgatcgagacgcgggagccgcgggagcgtctgctgctcactgccgcgcacctgctcttcgtggcgccgcacaacgactccgggcccactccgggaccgagcccactcttcgccagccgcgtgcgtccggggcagcgcgtgtacgtggtggctgaacgcggcggggaccgccggctgctgcccgccgcggtgcacagcgtaacgctacgagaggaggcggcgggtgcgtacgcgccgctcacggcggacggcaccattctcatcaaccgggtgctcgcctcgtgctacgcagtcatcgaggagcacagctgggcacaccgggccttcgcgcccttccgcctggcgcacgcgctgctggccgcgctggcacccgcccgcacggacggcgggggcgggggcagcatccctgccccgcaatctgtagcggaagcgaggggcgcagggccgcctgcgggcatccactggtactcgcagctgctgtaccacattggcacctggctgttggacagcgagaccctgcatcccttgggaatggcagtcaagtccagctgaagtccgacgggaccgggcagggggcgtgggggcgggcggggcgggaagcgactgccagataagcaaccgggaaagcgcacggaagga

SEQ ID NO: 936 - DNA, 4269 bp, Rattus norvegicus
  Genbank Accession No. NM_017222
ttaaaagtttggcgtgttgaaagtaagcattactcagctggcaatagagacagaaccaggggactggtgcttctgtggacttggccatttgcacagcacaagcagtgatggataactcctccgtctgttccccaaatgcaactttctgcgaaggtgattcctgcctagtaactgaaagcaacttcaatgccattctcagcacagtgatgagcaccgtgctcaccattcttctagccatggtgatgttttctatggggtgcaatgtggaaatcaacaagttcctaggacacataaagcggccatggggcatcttcgtgggcttcctctgtcagtttggaatcatgcctctcacaggatttatcctgtctgtggcctctggcatccttcctgtgcaggctgtggtggtgctaattatgggttgctgccctggaggaactggctccaatatcctggcctattggatagatggtgacatggacctcagtgttagcatgaccacttgctccacactgcttgctcttggaatgatgcccctttgcctcttcatctataccaagatgtgggttgactcaggaacgattgtgatcccctacgatagcattggcatttctctggttgcgcttgttattcctgtttccattggaatgtttgtaaatcacaaatggccccaaaaagcgaagattatacttaaaattggatccatcgcaggtgcaattctcattgtgctcatagctgtggttggaggaatactgtaccaaagtgcctggatcattgaacccaaactatggattataggaacaatatttcctatagctggctacagccttggtttcttcctggctagactagctggtcaaccctggtacaggtgccgaacagttgccttggaaactggaatgcagaacactcaactgtgttccaccattgtacaactctcctttagccctgaggatctcaaccttgtgttcaccttcccactcatctatactgttttccagctcgtctttgcagcaataatattaggaatgtatgtcacatacaagaaatgtcatggaaaaaatgatgctgagtttctagagaaaacagacaatgatatggaccccatgccatcattccaggagacaaacaagggatttcaaccagatgagaaatagacactaaggaggcaaaagaagaaagcttctggaacaacattcattaaacgaaaactaaaattatttcttttggtggaataatcagcagaaaaacaaatttaaaagttaaattcaaatttaaattattgggtttttttgtataaagggactagtgatccattcttttgtgtgacaaaggggtgtgtgtgtgtgtgtgtgtgtgtgtgtgtgtgtgtgcgcgcgcgcgcacgtgcgcgcgcacgtgcatgtgtgtttacaggagtcatttttctgtatccatggtcagattggtcacaagatattccttgattccaaattcacagaagcttaagcctcttttataaaaaggcaaagtgtttgtattaatctcctatatacttcaaatcaatattatcttactaaaatatttaacatgatgtaaatgttgtgtaaatagttgtccactgtattgtttagaaaatgattgttttatgtttagtacagatatcatttttcaatattttggccatagttaaaatcatagatgtcaaacatctttgggaggccaaagacatgtacatagaatgtatagatagatagatagatagatagatagatagatagatagatagatagatagatagatgatagacagacagaagataggcagacagagagatagctgattatcattaatatattatcagaaaacatctatagacctaacttgatataggtcaaacttgaaactttgtcatatgtaagctgaattcagagttaaatactttggtatgtaaaaatatagcatattactactgtaaaatgattttttcttgagtgcttatgattgtaagaagattgatgtgaatgaattttaattatgaattttaaatttttgcaacatatttacttgtgattttggactatactctggcaaatgtctatatttatattttagaaaagtagcttcaaatgacattctagaagtagaaatgagagaaagcattactaattaattcaataacaaattagaattggattaacttatctttttttttatccattcgcatacctctaggatccattgatactcattttatctttccagaaatagggctaattcaatacagtttaaatttgacaataatttttggaactctggagaggtttattcaaatatgacctgtatgaagcaggtccaaatgggccaatatgatagctattcagctcataggaggtgccataccagccaccacgagcaggaagatgtcagaagttacaaaggaaaaaaggtatcagtctagaaaatgacaatggagagacaaataatacaatgacaaataatacaatggagagacaaagaagcataaagaaaaagaaaaagataaaagaaatattgccaaaacttaatatggcaaaactgatgtgtgacaggaagtagatacaggaagattcatatctgaaagtgagatttgaagaagatgagaagtctccaggcagcaaagcaggaaagtcacccctcagatgtcacagatatacctataaatatgcctgtatatatccataatgatagaaaacaaataagatttggtaaaaatcagcaagattttatgactgccatagggaaggaatttgtcaagtgctgggtcttgagacccaacttggtttacttttcttcattttggagcagatacatgtttttaactagcctttagtggttggtcttatggaaacttttgatacccccatattcttgtggattcctttaacttataatgttctgccttcaaagagtatattacatttgattgatcttactttagatcacgaagaaggcttctggttgtagacttaaaatgttgcaatatatttaattggagatattgtcactgtctgtacagcatgtttgttccgacagcatgagggtctgagcttgactatcaacactcatataaaaatgctaagtatgataatgtgcagccgtaatcccagtgctagaaaggagaagccaggaggattagatccagtctagccaatcagtgggctctatgttcagtgagagaccatgttggaaatactaaaatgaacagctataaagggagttgcttacaattgaccacatacacatcacacacacacacacacacacacacacacacacacacacacggagcatcttctatcactagacaaaagaagtaagttgaactcagaatgtttgctttttgtgtgtgtaagtctaatttatttttttcttaaattgaactgattatggaatgtgaaggttaatttcttttttttttacttttttttattaacttgagtgtttcttatttacatttcgagtgttattccctttcctggtttcggggccaacatccccctaatccctccacctccccttctttatgggtgttcccctccccatcctccccccattgccgccctccccacaacaatcacgttcactgggggttcagtcttagcaggaccaagggcttccccttccactggtgatcttactagaatattcattgctacctatgaggtcagagtccacggtcagtccatgtatagtccttaggtagtggcttagtccctggaagctctggttgcttggcattgttgttcataaggggtctcgagctctatcaagctcttcagaactcagaatgttttaaagcactgggcattgactgggatacaagagactggattttcttctcagtaatgtcaagaaagtacctccaaggatacgaaaggaaatctagctgttaaaataccttgtgcactttcctcatcaagaagaaaacagacagatacactaaagacaccctgtgaatttctatcaagttttcaacatacccaatgtgcctggatgccagcagctgattcagctgggttttcttccctaatgattaaagaatgtgagtgacatagatctttgttttcttaccaggtagggtggcttgtgtttatttttcccctaatactctagaaggaagaaaaatagttaagctttctaaaatgacaaatctctatttttaaatgatttgggaaaagctgattaactcatgtatattattgcctctgtttcatattaaatgaatatttatattttaaaggaaagaataaa

SEQ ID NO: 937 - DNA, 2227 bp, Rattus norvegicus
  Genbank Accession No. NM_017224
gagctgtccagacccccgaagtgaagaaaagaggcgagggcaagggagggccagaaccgagggagagagaaaggaggggcagcccaccagcccgctgtcctgccacagaaccggctcagctccagctccaggagtcactcagctgcagaggcagtggcagccccactcctcaggcaaagggcagcagacagacagacagaggtcctaggactggaggtcctcagtcattgaccactcagcctggcccagccccatggccttcaatgacctcctgaaacaggtggggggcgtcggacgcttccagttgatccaggtcaccatggtggttgctcccctactgctgatggcttcccacaacaccttgcagaacttcactgccgctatcccccctcatcactgccgcccacctgccaatgccaatctcagcaaagatggaggtctggaggcctggctgcccctggacaagcaaggacaacccgaatcgtgcctccgctttacttccccccagtggggaccacccttttacaatggcacagaagccaatggcaccagagtcacagagccctgcattgatggctgggtctatgacaacagcaccttcccttcaaccatcgtgactgagtggaaccttgtgtgctctcatcgggctttccgccagctggcccagtccctgtacatggtgggagtgctgctgggagccatggtgtttggctacctggcggacaggctgggccgccggaaggtgctgatcttgaactacctgcagacagctgtgtcgggaacctgtgcagcctatgcacccaactatactgtctactgcgttttccggctcctctcgggcatgtctttggctagcattgcaatcaactgcatgacactaaatgtggaatggatgcctatccacacccgtgcctatgtgggcaccttgattggctatgtctacagcctgggccagttcctcctggctggcatcgcctatgctgtgccccactggcgccacctgcagcttgtggtctctgtgccttttttcattgccttcatctactcttggttcttcattgagtcagcccgctggtactcctcctcaggaaggctggacctcaccctccgagccctgcagagagtggcccggatcaatgggaaacaagaagaaggggctaagctaagtatagaggtgctccggaccagcctgcagaaggaactgactctaagcaaaggccaagcctcagccatggagctgctgcgctgccccacccttcgacacctcttcctctgtctctccatgctgtggtttgccactagctttgcctactacgggctggtcatggacctgcagggctttggggtcagcatgtaccttatccaggtgattttcggtgccgtggacctgcctgccaagtttgtatgcttcctagtcatcaactccatggggcgccggcctgcacagatggcctccctgctgctggcaggcatctgcatcctggtgaatggcataataccgaagagccatacgatcattcgcacctccctggctgtgctagggaagggctgcctggcttcctctttcaactgcatcttcctgtacaccggagagctgtaccccacagtgattcggcagacaggcctgggcatgggcagcaccatggcccgggtgggcagcattgtgagcccgctggtgagcatgactgcagagttctacccctccatgcctctcttcatcttcggcgctgtccctgtggtcgccagtgctgtcactgccctgctgccagagaccttgggccagccgctgccagatacagtgcaggacctgaagagcaggagcagaggaaagcagaatcaacagcagcaggaacagcagaagcagatgatgccgctccaggcctcaacacaagagaagaatggactttgagaacggaagggcttcacacagcactaaagggagtggggttctacaggtcctgccgtctacatgaggagggggagtgagtagagggactggaccatccaaatgtggaggctgccattcagagaaatccctccccaaaggtcatgtcagtagacccactaggaacaaaagctctgactatgtgcagcttcttaagcagaatgttctcgtcaccggccatcttcctgctcatggtcactccgccacctccaggaccttgcaaagaatctcagacaattaaatgaatctcttctaaaaaaaaaaaaaaaaaaaaaaaaaaaa

SEQ ID NO: 938 - DNA, 1075 bp, Rattus norvegicus
  Genbank Accession No. NM_017236
gtttaactgcactcgggactcggcgcgcgcgtgtgtctgttctctccatcgtcatggccgccgacatcagccagtgggccgggccgctgtcattacaggaggtggatgagccgccccagcacgccctgagggtcgactacggcggagtaacggtggacgagctgggcaaagtgctgacgcccacccaggtcatgaatagaccaagcagcatttcatgggatggccttgatcctgggaagctctacaccctggtcctcacagaccccgatgctcccagcaggaaggaccccaaattcagggagtggcaccacttcctggtggtcaacatgaagggcaacgacattagcagtggcactgtcctctccgaatacgtgggctccggacctcccaaagacacaggtctgcaccgctacgtctggctggtgtatgagcaggagcagcctctgaactgtgacgagcccatcctcagcaacaagtctggagacaaccgcggcaagttcaaggtggagtccttccgcaagaagtaccacctgggagccccggtggccggcacgtgcttccaggcagagtgggatgactctgtgcccaagctgcatgatcagctggctgggaagtaggggcgctgcagagcccgcagccccggggaccccacagtacagtcaagtcgtataaagcatgtctgtggggtgtccccccacgcccatccttccttcccaccctctcatagggagttctcagttgtgctaggttacagctctaggatgtcttccactttgtccaggaccaggcccagtaacatcttttggggtgggcttatcaatcctcccatctcggctgagccctgaccgcccaggtcagatggctgcatagttatcaatattcctgggctgctgctacgcagtgctgctgtgtggaggccaggctgtggagagagaccctgttagccccttacatcccagtgggataagcaaaagtcaccggagttgctgggcgtgttaaacctcatcaaatacaaataaagggcattgcattcagaaaaaaaaaaaaaaaaaaaaaaaaaaaaaaaaaaaaaaaa

SEQ ID NO: 939 - DNA, 1981 bp, Rattus norvegicus
  Genbank Accession No. NM_017243
caacgcggttctgttggtgttcaggttccctactgacttcccttccagtggcagcggcggaggcggcagtggcagcggcaagcactgagcacgtttgggtagttgtccaagatgccgaatatcaaaatcttcagcgggagctcccaccaggacttatcccagaaaattgctgaccgcctgggcctggagctaggcaaggtggtgactaagaaattcagcaaccaggagacctgtgtggaaattggggagagtgttcgtggagaggatgtctacattgttcagagtggctgcggtgagataaatgacaatctaatggagcttttgatcatgatcaatgcttgcaagatcgcttctgccagccgggttactgcggtcatcccatgcttcccttatgcccggcaggataagaaggataagagccgggctccaatctcagctaagcttgttgcaaatatgctatctgtagcaggtgcggatcatattatcaccatggatctacatgcatctcagattcagggcttctttgatatcccagtggacaatttatacgcagagccagctgtcctgaagtggattcgggagaacatatctgagtggagaaactgtactattgtctcacctgacgctggcggagccaagagagtgacctccattgcagaccgattgaatgtggattttgctttgattcacaaagaacggaagaaggccaatgaagtggaccgcatggtactagtaggagatgtgaaggatcgtgtggctatacttgtggatgacatggctgacacttgtggtacaatttgtcatgctgctgacaaacttctctcagctggagctaccagagtttatgccattttgacgcatgggatcttttctggtccagccatttctcgcatcaacaatgcatgctttgaagcagtagtagttaccaataccatacctcaggaggacaagatgaaacactgctccaaaatccaggtgatcgacatctctatgatccttgcagaagccatcaggagaacccacaatggagaatctgtctcctacctgttcagccatgttcctctataatatcataaattctgaagcgttttcaaaatgaaaccacccccaccccttgtttttcttgtatttggtgagttgggcagaagagccagcttgcttcagtgtagctttttacagcccacattagctacattaggatttatcctaattggagaaagacagactgctattaactgctaggacaccctacgtgcattgttgcagcctggctttcttgtttattttgtgatccttgcagctttaaattgagttccactgttgaaagctgcatagactgttaaaagagagagtattccccaaggtccttaggatggaattgtggagctcatactccattgcatgtgaaggctttggagtttccttcattcagaataactagcgacaaagccagccctcgtgtgatacattttcagaggtgtatgctacactgcagcaagttccctgtgcatccttaaacagagttcgcctgctgagcaccctgtacggcaggggcgggtagctcaatgcagtaatcaatttttgggaggaagaagcctgatctattatcatctgtttaattctctgtagcttggattctctatgcctattcctttcctgttggcttcaccttcagctatctcgaccctttcctggacaaatatcttgaactcagtgatcattgtttgtgacaaaattttctgtaagacagacttgcttcttgctatgtaactgctaacgttgacattaggtaacttgctatagcacaatcttccttagcccgctctctctgagttagtgggttttaggtggtgtgtgtgtcgtagtgccttttgattaatttaagtatttaatttttatcttccttcgatctgtttggcttaacaatttgatcttattgtctcatgtagaagaaacttaataaaatgtctgtcatgtgtac

SEQ ID NO: 940 - DNA, 806 bp, Rattus norvegicus
  Genbank Accession No. NM_017257
tgcgaaagctggggctgctatcccagattcgagagctggcaagtggggaagcatggccaagccttgtggggttcgcttgagtggagaagcccgtaaacaggtggatgccttcagacaaaatcttttccaggaggctgaggacttcctttgcactttcttgccacggaaaatcatatccctgagtcagctcttgcaagaggattccctcaatgtggctgacctctcctccctccgggctcctctggacatccctatcccagatcccccacccaaggatgatgagatggaaaccgagcaggagaagaaagaagtccctaagtgtggcttcctccctgggaatgagaagcttctggccctgcttgccttggttaagccagaagtctggactctcaaagagaagtgcattctggtaatcacatggatccagcacctgatccccaagattgaggacggaaatgattttggggtggcaattcaggagaaggtgctggagagagtgaatgctgtcaagaccaaagtggaagccttccagacagccatctccaagtatttctcagagcgtggggatgctgtagccaaggcctccaaggacacccatgtaatggattaccgggccttggtgcacgagcgagatgaagcagcctatggggcgcttagggccatggtgctggacctgagagccttctatgctgagcttcatcacatcatcagcagcaacctagagaaaattgtcaacccaaagggtgaagaaaagccatctatgtactgagcaaaggattagaaggaaaataaatgatttatacttt

SEQ ID NO: 941 - DNA, 1464 bp, Rattus norvegicus
  Genbank Accession No. NM_017258
atgcatcccttctacactcgggccgccaccatgataggcgagatcgccgccgcggtgtccttcatctccaagttcctccgcaccaaggggctcacgagcgagcgacagctgcagactttcagccagagcctgcaggaactgctggcagagcattacaaacatcactggttcccagaaaagccgtgcaagggatcaggttaccgttgtattcgcatcaaccataagatggatcctctgattggacaggcagcccagcggattggactgagcagtcaagagttgttcaggcttctcccaagtgaactcacactctgggttgacccctacgaagtgtcctacaggattggagaggatggctccatctgtgtgctgtatgaagcctcaccagcgggaggtagctctcaaaacagcaccaacgtgcaaatggtagacagcagaatcagctgtaaggaggaacttctcttgggcagaacaagcccttccaaaaactacaatatgatgactgtatcaggttaagatatagtctatggatggatcatcttataatggatggatagatttgattttttgctttgggtgggctcctcttggggatggattatggaataaccatgtcacagctgtgaagatctggcacaagatagagtggtaataatttttttttttaaagtgacagtgccatagtttggacagtacctttaagtgatttaagtagcctgtgagtccaagtaaaggatcactttatttggtagggagtgaagtcgcagggtggtttcagtttctcccagaccttatacccaatttgtcacaccagtccctttaaggaaattctgtatttcaaagaaccctcttttgcagtcagtcaaccttgcaggggaatttgcactatttacacttgaaagttaccagtaacttttttttggcagctcaataggaaagctcaatgttctaagcatggtagtactggaaatattacacggagacttttacctagcacttaaaaatgtataaatgtacataaagacacttagtacgcatgacctgggggaaatggtcagaccttgtgtttttggctttgagagtagcaagtgaccggaatctgccatgacaacaggcttttaaaagacccttacaaagacactgtctcaactgtggttagcaccagccagctctctgtacattcgcttgtagttttctaagattgagtgagtaaacttcttatttttagaaagtggaggtctggtttgtaactttccttgtactcaattgggtaagagtctttttccacaaaccgccatctattttgtgaactttgttagtcatcttttatttggtaaattatgaactggtgtaaatttgtacagttcatgtatattgattgtggcaaagttgtacagatttctatattttggatgagaaatttttcttctctctataataaattgtttcttatcttggcatttt

SEQ ID NO: 942 - DNA, 2519 bp, Rattus norvegicus
  Genbank Accession No. NM_017259
agagcccgtgaggcggccggaccatcatcgtcctgctaatacagctacttcctcaaccaccggtatgagccacgggaagagaaccgacatgctcccggagatcgccgccgccgtaggtttcctcaccagtctcctgaggactcggggctgcgtgagcgagcagagactcaaggttttcagtagggcgctccaggacgcactgaccgatcattacaaacaccactggtttccagaaaagccatccaagggctccggctatcgctgtatccgcatcaaccacaagatggaccccatcatcagcaaggtggccagccagatcggactcagccagccccagctgcaccagctcctgcccagcgagctgaccctgtgggtcgatccctacgaagtgtcctaccgcatcggggaagatggatccatctgcgtgctgtatgaggaggcgccggtggccacctcctacgggctcctcacctgcaagaaccagatgatgctgggcaggagcagtccatcgaagaactacgtgatgactgtctccagctagagaggagccgccccgccctggcactctactgttctcatgctgccctgacaacaggccaccgtatacctcaacctggggaactgtatttttaaagtgaagagctatttatacatgttatttttttttttaagaaaagaggaggaaaaaaaccaaaagtttttttttaaaaaaacaaaaaagaaaaaacaattcgttaacgggagctgcttggaagtggtctccccaggtgcctttggagagaactgttcttgattgagtctatgagccagtgtttgcctaggggagtgggttggggattggcctagccaaggtaaaaggggattcttggctgatcccccaggaggtggtggaagggagcaaggttagcaactgtgaacgagaggggtcagggtctgctctgggttaccgttcccgctgggatgcctgtattcctggtccctctcttactcaggggcattcaagcctggtctcaaataatactacattgcctaatcttctcttttgtttttctgctgagatcctgggcacacggaaaggcctctcctgtcccttccgtctgagcagagtttcttgaaactgtgtctcgtttctgatcctaccctcggggtcctgaagaggtggtttcccggcctagaatctatctaaacgtttttggagggtgggctataaggcagatataatggaggggaaccgcacaaaccctttgctttgctctgtgctgctttgtatggatggatggttaataacttagggatgatttgcaatggaattttgggacccaaagagtatccaatgggggtgggtgttttggacctaagccctccttttgggaaccacgtgacagtctgaatgctgctaccattattcctttgagaggtggctcaaagctccagggaactccaggtcctttcttactgccttctcttcaagagcaacctcccccatttcttttccctctttcctgcggttgggtcctggagggccccatttcctaggacaagagttctcaatcactgtgcaatagtcccaggaagctctggaactgggcctcccagcccctcctgattcctggtgggttttaggaccccgccttccccgttcttctgactggctggtgggccttgaggagatctccctcggccgcagggagggcacctgtgcactgcaggactacctggtactcctgtggggctgccacggagagccaaaccttaggcatagctttgtctcctcggtgctcagagcacctgcagggggaggttgcccccctcagtaaaaatccaaatttatttgtagatgtgtgcaatatttactgttctgggttggagaaaatcgggaaacactgggaagaagtggccttccttcaggttcagtgacactgatgagggcttctcagaaggcctcgagtctctcaaaccaaaggacagagctagagccagccagtcacccttagtgaggatccccttccccatgtctctccactgccgtggcatcccatgtcctggatttctcaattcctcagtttctactcaaaggtgctacttaccaaacactctgcccgtcccgctctccccagcttcgcacagccgtcccaggtggcttcgtctctcctgctttaaagttaactttgggcccacagacccgagagctgtgggttgaagcaaagctgtgaatcgctccagatggtccctgtgttctgtccacacacaggtccccgcctttttagaagcagcctcctggtctcatgcttaaatctgttcctcactgcccgtgttcactttagaaatggcagaaccacagagctggactgttgagcaggcctgtctctctcattaaatagaaataagtaagtttgtaagctattccgacagaagagacaaaggttactgattgtacaatagcgcttttatatggaagactgtacagctttatggacaaatgtaaaacttttttgtttttaataaaaatgtagcagacc

SEQ ID NO: 943 - DNA, 897 bp, Rattus norvegicus
  Genbank Accession No. NM_017280
cgttctgtggcctgccgggtcagcaccatgagctccattggcactgggtatgacctgtcagcctctacattctctcctgatggaagagttttccaagttgaatatgctatgaaggctgtggaaaacagtagtacagctattgggatcagatgtaaagatggtgttgtgtttggggtagaaaaattagtcctttctaaactttatgaagaaggctccaataaacgtcttttcaatgttgatcgacatgttggaatggcagtggcaggtttgttggcagatgctcgttccttggcagacatagcaagagaagaagcgtccaactttaggtctaactttggctataacattcctctaaaacatcttgcagacagagtggccatgtatgtacacgcgtatacactctacagtgctgttagaccttttggctgcagtttcatgttggggtcttacagtgtgaatgatggtgcacagctctatatgatcgatccatcaggtgtttcatatggttactggggctgtgccattggcaaagccaggcaagctgcaaagacagaaatagaaaagcttcagatgaaggaaatgacctgccgtgatgtagttaaagaagttgcaaaaataatttacatagtacatgatgaagttaaggataaagcttttgaactagagctcagctgggttggtgaattaactaaaggaagacatgaaattgttcccaaagacgtaagagaggaagcagagaaatatgccaaggaatctttgaaggaagaagatgaatcagatgacgacaatatgtaacatttcaccatcctctggtgtccatttctgtgacagttgcatatggctagcaccatggattatatatacccactgaccaattttcattaaattttgtcttat

SEQ ID NO: 944 - DNA, 1121 bp, Rattus norvegicus
  Genbank Accession No. NM_017281
cttggccatccgggttggttcttctccagctgagtaaagcggcgctgatctgcaccctcactgtcttcctccggatccacataaaattcagaagccatgtctcgaagatatgactccaggaccacaatattttctccagaaggtcgcttataccaagtggaatatgccatggaagccattggacacgcaggcacttgtttgggaattttagccaatgatggcgttctgcttgcagcagagaggcgcaacatccacaagcttcttgatgaagtctttttttctgagaaaatttataaacttaacgaggacatggcttgcagtgtggcaggcataacatctgatgccaacgttctgactaatgaactcaggctcattgctcaaaggtacttattacagtatcaggagccaattccctgtgagcagttggttacagcactgtgtgatatcaaacaggcgtacacacagtttggaggcaaacgtccctttggtgtttctttgctgtatattggctgggataagcactatggctttcagctctatcagagtgacccaagtggaaactacgggggatggaaagccacatgcattggaaacaacagtgctgcagcggtatcaatgctgaaacaagactacaaagaaggagaaatgactctgaagtcagcgctggctctggctgtcaaggtgctaaacaagacaatggatgttagtaaactgtcagctgaaaaagtggaaatcgccacactaacaagagagaatggaaagaccgtgatcagagtcctcaagcaaaaggaagtggaacagttgatcaaaaaacatgaagaggaagaagcgaaagctgaacgggagaagaaagaaaaagaacagagagaaaaggataaatagacagaatcatggattttataactccttagaggcgccagttcacttaggagctgtcctggccttcccctggaagtgttttcttgtattttcttccttaccttggccatcggggaaatgggacattgcatactgaattgggtccatgtctgtccagctggatgctttattgtaatgatggacatctttataaacatcttaatctcgacacataatttttggaataaaacctggaaagattg

SEQ ID NO: 945 - DNA, 970 bp, Rattus norvegicus
  Genbank Accession No. NM_017282
gcggtgtggttgagtagggtgctgctttcagtcgtgtggcctttggaactccgcgtagcactgccgcctcctcctgtcctcgccatgttcctcactcggtccgagtacgacaggggtgtgaacactttttctcctgaaggaagattatttcaagtggaatatgccattgagggccataagcttggttctacggccattggcatccagacatcagagggtgtatgtctagctgtggagaagagaattacctcgccactaatggagcctagcagcattgagaaaatcgtagagattgatgctcatataggttgtgccatgagtgggctaattgctgatgctaaaactttaattgataaagccagagtggagacacagaaccactggttcacctataatgagacaatgacagttgagagtgttacccaggctgtgtccaatctggctttgcagttcggagaagaagatgcagatccaggtgctatgtctcgtccctttggagtagcattgttgtttggaggagttgatgagaaagggccccaactgtttcacatggacccatctgggaccttcgtacagtgtgatgctcgagcaattggttctgcgtcagagggtgcccagagctccttgcaggaagtttaccacaagtctacgactctgaaggaggccatcaagtcttcactcatcatcctcaagcaagtcatggaggagaagctgaacgcaactaacatcgagctggccacagtgcagcctggtcagaatttccacatgttcacaaaggaagaactggaggaggtgatcaaggacatttaaggaggggccatcctcgaacttctgtgggacagtttcagttctaatggctcttagactttatttccaactccacgtcgtgaaaatatccagtatatgtatgtgtgtttttttatgatgtctgtacataacagcaattctgaaataaaaaaaatttacaaat

SEQ ID NO: 946 - DNA, 932 bp, Rattus norvegicus
  Genbank Accession No. NM_017283
gtgtgtgtgcgctacggggtgwagactgtgtctgaaatagcgggaacgccatgtcccgtggttccagcgccggttttgaccggcacattactattttctctcccgagggccgactctaccaagtagaatatgcttttaaggctattaaccagggtggacttacatctgtagctgtcagaggaaaggactgcgcagttattgtcacacagaagaaagtacctgacaaactactggattccagcaccgtgactcacttattcaagataacggaaaacattggctgtgtgatgacaggaatgacagctgacagcagatcccaggtacagagggcacgctatgaagcagctaactggaaatacaaatatggctatgagattcctgtggacatgctgtgtaaaagaattgctgatatttctcaagtctacacacagaatgctgaaatgaggccacttggttgttgtatgattttaattggtatagatgaagagcaaggccctcaagtgtacaagtgtgatcctgcaggctactactgtggctttaaagccaccgcagcaggagtgaagcagacagagtcaaccagcttcctcgaaaaaaaagtgaagaagaaatttgattggacatttgaacagacagtggaaactgcaatcacatgcctgtctactgttctgtcgattgatttcaaaccttcagaaatcgaagttggagtagttacagttgaaaatcctaaattcaggattcttacagaagcagagattgacgctcaccttgtggctctagcagagagagactgaacactcttatcagcttaccagatccatgatgccatgtgcctatgtgtttagtaacaacaaaccgacatcttagaggccctggattgaagatggaaactctcccactcctcctgccactgactggttaggactctgtataaa

SEQ ID NO: 947 - DNA, 5648 bp, Rattus norvegicus
  Genbank Accession No. NM_017290
cggagccgtccccgacgccacctcccgtctcctccgccgcagtttcctccgccgctgtcgggggtgcagagctgaggggctcgggcagcgcgccgcgcagctcctctccagtcgcccgcctcgccgtcctccccaccgagggctcgcccgggcgcccctcctcagccgcgccgggtctcctcgcgcagcgccgcggcctgcgctacctgcggccggctggcaacagaggcaacgcacactcgcggcggggcgggaggctcgcagcccctcgggcgggctcggcgaggcccggccgcgtgcggcggtttctgggggagggggctcgggtgattcagcgcccggtcaggcggaagcggccgccgccgcggaggaggaggagaaagaggaggggacagctgtccgcgcccgggcgcccgcggtggcacgagcccgcggcccgagtgcgaggcggaggcgaggaggccgcggggacgcgaggcgaggccggccggggcccccgcagccatggagaacgctcacacaaagaccgtggaggaggtgctgggccacttcggcgtcaacgagagcacggggctgagcctggagcaggtcaagaagctcaaggagagatggggctccaacgaattgccggctgaagaaggaaagaccttgctggaacttgtgatcgagcagtttgaagacttactagttagaattttattgctggcagcatgtatatctttcgttttggcttggttcgaagaaggtgaagaaacgattacagcctttgtagaaccttttgtaattctgcttatattggtagccaatgcaattgtgggtgtatggcaggagagaaacgctgaaaatgcaatagaagctcttaaggagtatgaacctgaaatgggcaaggtgtatcgacaggacagaaagagtgtgcagcggattaaagcgaaagatatagttcctggggatatagtggaaattgctgttggtgacaaagttccggctgacattagattgacatccatcaagtctacaactctgagagttgaccagtcgattcttacaggtgaatctgtctcggtcatcaagcatactgaccccgtccctgacccacgagctgttaatcaagacaaaaagaacatgctcttttctggcacaaacatcgctgctggcaaagctatgggagtggtggtggcgactggagtcaatactgagatcggcaagatccgggatgaaatggttgcaacagaacaggagagaacacccctacagcagaagctggacgagtttggggaacagctttccaaagttatctccctcatttgcattgcagtctggatcatcaacatcgggcatttcaatgacccagttcatggtggctcttggatcagaggtgccatctactactttaagattgcagtggccctggctgttgctgccatccctgagggtctgcctgctgtcatcaccacctgcttggctcttggaactcgaaggatggcaaagaaaaatgctattgttcgaagtctgccttctgtggaaacccttggttgtacttctgttatctgctcagacaagaccggcacacttaccacaaaccagatgtccgtctgcaggatgttcattctggacaaagtagaaggtgatacttgttcccttaatgagtttaccataactggatcaacctatgcacccattggagaagtgcaaaaagatgacaagccagtgaaatgccatcagtatgacgggcttgtagagttagcaacgatctgtgctctgtgtaatgactctgctttggattacaatgaggcgaagggtgtgtatgaaaaagttggagaagccacagagactgctctcacgtgcctggtagagaagatgaatgtattcgacacggagctgaagggactttctaaaatagaacgcgccaacgcctgcaactcggtcataaaacagcttatgaagaaggaattcacgctagagttttcacgtgatagaaaatcaatgtccgtctactgtacaccaaacaaaccgagccggacgtccatgagcaagatgtttgtgaagggtgctccagaaggtgtcatcgacaggtgcacccacatccgagttggaagtaccaaggtccccatgacgcctggtgttaaacagaagattatgtctgtcattcgggagtggggcagtggcagcgacacactgcggtgcctggctctggccactcatgacaacccgctgaggagagaggagatgcacctggaagattctgcgaacttcatcaaatatgagaccaatctgactttcgttggctgtgtgggcatgctggaccctcccaggattgaagtggcctcttctgtgaagctgtgccggcaagcgggcatccgagtcatcatgatcactggggataacaaaggcactgctgtggccatctgtcgccgcattggcatctttgggcaggatgaggatgtgacatcaaaggcttttacagggcgagaatttgatgaattaagcccctcagcccagagagacgcctgcttaaatgcccgttgttttgctcgagttgaaccttcccacaagtctaagatcgttgagttcctgcagtcctttgatgagatcacagctatgactggtgatggtgtgaacgacgcgcccgctctgaagaagtcggaaatcgggattgccatgggctcagggactgcagtggctaagacggcctctgagatggtgctggccgacgacaacttctccaccatcgtggccgctgttgaggaggggcgcgccatctacaacaacatgaagcagttcatccgctacctcatctcctccaacgtgggggaggtggtctgtatcttcctgacggcagcccttgggtttcctgaggctttgattcctgtccagttactctgggtcaatctggtgacggatggtctgcctgccactgcgctggggttcaatcctccagatctggacatcatgaacaaacccccacggaacccaaaagaaccgctgatcagcgggtggctctttttccgttacctggctattggctgttatgttggcgctgccaccgtgggtgctgctgcgtggtggttcatcgctgctgacggtggtccgagagtctccttctaccagctgagtcatttcctgcagtgtaaggaggacaacccagacttcgaaggagtggattgtgcaatctttgagtccccgtatccgatgacaatggcactttctgttctagtcaccatagagatgtgcaatgccctcaacagcttgtctgaaaaccagtccctgctgaggatgcccccctgggagaacatctggctcgtgggctccatctgcttgtccatgtcccttcacttcttgatcctctacgtggaacctttgccactcattttccagatcacaccgctgaatctgacccagtggctgatggtgctgaaaatctccctgcctgtgatcctcatggacgagacgctcaagtttgtggcccgaaactacctggagcctggtaaagagtgtgcgcagcctgccaccaaaccctcctgctccctgtcggcatgcaccgacggcatttcctggccctttgtgctgctcattatgcccctggtggtctgggtctacagcacagacactaactttagtgatatgttctggtcttgactgacagcgctacatgcagaagatgtttaacttaatcaattaattttttattgtttaaagcaactgtctatttctgctgaattttcacatgaacatattggctggtgaaggaggtttcatatctagattttgttttgctttttctgactccagtgggacaagattttccttttttttatacacataattaaagtgtccattgacatgtacagagaactaacactattttatgcagatatttttttgtagatgaaaaaagcatgtacagtgttctgtttcatactcatacttgtacaaagatcgttgagccagcagacattgtcagcaagttaattggcagcagacttaggaaatgaatgtgtgtggtttttaaaagaaaaaaaactaaatagcatgtattgtgtcttttgcatgattctctggatttaatttggtatcacagtctaatttttattcataagccaatttttctgcactgagcagagtcctgctacctcagtcagtatttttggtttgccactccctgcaccctcagcctctgtcacccccagcccaccctggcccgctcggctgcttctgtaggtctgatggttctgtttacatctgtcttcacgaggtttgcctgtctcgcttgtgcagaaaacattgctccagatccaatcgactgggtttctgtcccttcgcctagtttttaaggttatttatttaaatgtctaatgtattttattgtaacagacattgttttgccaacattgcctattcagtggcacttcacaatctagtttaaaagaaaaataaaacattttaaatggacagaggaaaataactgtcttgttcttaatggccttgaactacccatgatcagttcaaattcctgagcttctcagctcggagccttagtttcctgttcctgagaagaacgtgtactgctgcacagtagggattatctataatgtacaggcacgatcgtcatgtgacaaacatttactcaagtttctgctggcctggtgtatgtaggctggtgtaagggcaagtgtgtgtgtgtatgtgtgtgtgtgttctgtaaaatctgtaaatagcacatgaccaaatgaactgtatagaaatatttttatttgaatatggcactaaccaccaccaccatgactgaccggacgtttgcgcatgttcaaggtcagtcttaacggcagtgtgagtcattaacagtcctaactgtggtgttttcctccaatgccttccaacatccatcaactaaccaatactggagtaaccgcttcctaaacattgcagaaatgtaagggtgttcgggtgcgtgcatgtgcgttgttagcaacacatcttccagccctctgcatgactgagcttggggaaagagaaatagaacagcccccagctcactgtgtgatgtggaggaaatgtgtattacaagtggggttttagctgttgagtcaaaataataacaagtgtacaatttagcataaggaatcggagagcctctccagagaagtcggtttctttgctgcaagaagaatgaggttctgaacccttatccaagaacagaagccatcagccaagtctccacatttctctgcaaaatgttgtagcctctataactgtatgatagtgtaatgcatgccttcagttgtaagtggccagatcgcgctacagtgacattgaaacctgctctctaattggccctgtacagtttgcttatttataaattcatttaaaacactacagctgttgaatggttacaacctaggcctccggtcctaacttcagttgttctcctcggtgtgcagccagctgttccacactgtattattgtaacttatttagtgaagtcagaagcagtagacagatgttggtgcaatacaagtattgtgtgcatttatcgtaataaagtgctccgcgtcggttcagttcctcacagcttctcacagtgcatgtctgactgtagtctgtaaatagaggtcagtgtccgtgctgctaacaggtatcgatcgcacaga

SEQ ID NO: 948 - DNA, 1382 bp, Rattus norvegicus
  Genbank Accession No. NM_017305
gaattccggccttccctccgtggctccggcgctgcccggtcccctcgggcggcagctgccatgggcaccgacagccgcgcggccggagcacttctggcgcgggccagcaccctgcacctgcagaccgggaacctgctcaactggggccgcctgcggaaaaagtgtccgtccacgcacagcgaggagcttcgagactgtatccaaaagaccttgaatgaatggagctcccaaatcagccctgatttggtcagggagtttccagatgttttggaatgtaccatgtcccatgcagtggaaaagataaaccctgatgaaagagaagaaatgaaagtttctgctaaactgttcattgtaggatcgaattcttcatcatcaactagaaatgcagttgacatggcatgctcagtccttggagttgcacagctggactctgtcatcatggcttcccctccaattgaagatggagttaatctttccttggagcatttgcagccttactgggaggaattagaaaacttagttcagagcaagaagattgttgctataggcacctcggatctagacaaaacacagttggagcagctgtaccagtgggcacaggtaaaacccaatagtaatcaagttaatcttgcctcctgctgtgtgatgccaccagatttgactgcatttgctaaacagtttgacatacagctactgactcacaatgacccaaaagaactgctctctgaggcaagtttccaggaagctcttcaagaaagcatccctgacattgaagcccaggagtgggtgccactgtggctgctgaggtactcggtcatcgtgaaaagcagaggaatcatcaagtcaaaaggatacattttgcaagccaaaagaaagggttcttaactacagctcaagctcacaactcaggggccttgtatttatctggaacataagataaaaattcatgataaaattgagatgtgtaaaaaaaaatctagctctcgcctacaaaaagcgtcactgaggcgtgaatgtggtggtttggcaatgtgttgagtttaagtacctccctggcgtctgcagcagcgcactcacaggaagcattgtattctcttcattaaactcttggtttctaactgaaatcgtctataaagaaaaatacttgcaatatatttcctttatttttatgagtaatagaaatcaagaaaatttgttttaagatatattttggcttaggcatcagggtgatgtatatacatattttttatttctaaaattcagtaactgcttcttactctatacttctataactaagcaattacattacagttgttaagacatactggaagagatttttttcctgtcgtttgacaaaataatctatctcagagtcggaattc

SEQ ID NO: 949 - DNA, 1330 bp, Rattus norvegicus
  Genbank Accession No. NM_017320
gggactctctcatgccgccatacggagatggctgttttgggtgcccctggtgtgctctgtgacaatggagcaactgcagagagacctaccctggaccaccactgggatctctggaagaaaactcgcatgagaaggaatacagatcagaatgaagaagacgtacgacgtctcatctgggaaaagaatctcaagtttataatgcttcacaatctggaacattctatgggaatgcattcatacagtgtgggcatgaaccacatgggagacatgacacctgaagaagtcataggttatatgggctctctgagaattcccaggccctggaatagaagtggcactctcaagtcaagctctaatcagacattgcccgactctgtggactggcgagaaaagggctgcgtcactaatgtgaaataccagggctcttgtggttcctgctgggctttcagcgccgagggggcccttgaagggcagctgaagctgaaaacggggaagctggtgtctctcagtgctcagaacctggtggattgctcaaccgaagaaaagtacgggaataaaggctgcgggggtggcttcatgaccgaagctttccagtacatcatcgatacgagcatcgactcagaagcttcctatccctacaaagccatggatgaaaagtgtctctatgacccaaaaaatcgagctgccacgtgttcaaggtacattgagctccccttcggcgatgaagaagctctgaaagaagcagtggccactaaagggcctgtctctgtgggcatcgacgacgccagccattcctccttcttcctctaccaaagtggtgtctatgatgacccctcctgtaccgagaatatgaatcatggtgttctcgtggttggctatgggactcttgatgggaaagactactggcttgtgaaaaacagttggggccttcactttggtgatcaaggatatattcggatggcgagaaataacaaaaatcactgcgggattgctagctattgctcttacccagaaatctaaaccgtttcttctttttctaatgggtcacaaagacggaatacactctaatttaattttgtctgctccatccggaggacccaagtgtgtcgtgatcagtgtgtacatactgtgctaactggcttacagcttgtttgttttataactttacctctctctgaaaagtctgtaagcaaggacgcgctgaggatggagctggcagtctgtcctagatattctttctatgcttgcaccctgtcgtctaatgtgtctaataaccctttgtaacacagatatccccaaagtgcctaataaaatctgtcatttcaagctc

SEQ ID NO: 950 - DNA, 3564 bp, Rattus norvegicus
  Genbank Accession No. NM_017321
cgctgagtagatcactgttaagtttgagacttgtttcaaactaaaaaatgatgagggatatagcccagtagtaaagttacatgcctagatttctcagtgagtgccttggagcatgactcagtggtggagccctgcctagaatccccagtgagggcctgggttcttgcttgcacccgcctgtgtgctccgtgctccgtgagccccgctgtgagcgagacacgtgaccgtcagtaatcatgaagaatccatttgcgcaccttgccgagcccttggaccctgcacagccaggaaagaaattcttcaacttgaataaattggaggactcaagatatggacgcttaccgttctctatcagagttctcctggaggccgccgttcggaactgtgacgagtttttggtgaagaagaatgacattgagaatatcctgaactggagtatcatgcagcataagagcatagaagtgccgtttaagccagcccgagtcatactgcaggactttacgggcgtgcctgctgtggttgattttgcagcaatgcgcgatgctgtgaagaagttgggaggaaatccagagaaaataaaccctgtctgccccgctgaccttgtaatcgatcattccatccaggttcatttcaacagaagggcagacagtttgcagaagaatcaagacctggaatttgaaaggaatagagaacgatttgaatttttaaagtggggttcccaggccttttgcaacatgaggattattcctcctggctcaggaattattcaccaagtgaatctggagtatttggcaagagtagtgtttgatcaggatggatgttactacccagatagcctcgtgggcacagattctcacaccaccatgattgatggtctgggagttcttggttggggtgtaggtggtattgaagcagaagctgtcatgctgggtcagccaatcagcatggtgcttccccaggtgattggctacaagctgatggggaagcctcaccctctggtaacctccacggacattgtgctcaccattaccaagcacctccgacaagttggggtcgtgggcaaattcgtggagtttttcgggccaggagtggcccagctgtccattgctgaccgagctacgattgccaacatgtgcccagagtacggcgcgacggcagccttcttcccggtcgacgacgttagcatcgcgtacctggtgcagacaggtcgtgaggaagacaaagtaaagcacattaaaaggtatcttcaggctgtaggcatgtttcgagacttcagtgactcctctcaagacccagacttcactcaggtcgtggagttagatttgaaaacagttgtgccttgctgcagtggacctaaaagacctcaggacaaagttgctgtgtctgagattgaaaaggactttgaaagctgccttggagccaagcaaggatttaaaggttttcaagttgctccagaccatcacaatgaccacaagacgtttatctataacgacagtgaattcactcttgctcatggctccgtggtgatcgccgccatcactagctgcacaaacaccagcaatccgtccgtgatgttaggcgcaggattgttagcaaagaaagccgtagaggctggcctgaatgtgaagccttacgtcaaaaccagcctgtctcctgggagtggagtggtcacctactaccttcgagagagtggagtcatgccttacctgtcccagttagggtttgacgtggtgggctacggctgcatgacctgcatcggcaacagtggacccctccccgaacctgtggtggaggctatcacccagggagaccttgtggctgttggggtactgtctggaaacaggaattttgaaggacgagtccatcctaacacccgggccaactacttagcatctcccccactagtaatagcatatgcaattgcaggcaccgtcaggatcgacttcgagaaagagcctttgggagtgaacgcacagggccaacaagtgtttctgaaggatatctggccaactcgagatgagatccaggaggtggagcggaagtatgtcatccccggcatgttcaaggaggtctatcagaagatagagactgtaaacaaaagctggaatgccttagcagccccttcagagaagctgtatgcgtggaaccccaagtctacttatatcaagtcaccgccattctttgaaagcttgactttagatctccagccccccaagtctatagtggatgcctatgtgctactaaatctaggagattccgtaacaacggaccatatctctccagcggggaacattgcaagaaacagccctgccgctcgctacttgacgaacagaggcctgacgccacgagatttcaactcctacggctcccgccggggtaacgacgccatcatggcacgggggacatttgccaacattcgcttgctgaacaagtttctgaacaagcaggcccctcagactgtccaccttccttcaggagaaaccctcgatgtgttcgatgccgctgagcggtaccagcaggctggacttcccctgattgttctggctggcaaagagtacggttcaggcagctcccgagactgggcagccaaaggtcctttcctgctgggaatcaaagctgtcctggcagagagctacgagcgcactcactgcagcaacctggttggcatgggggtgatcccccttgagtatctccccggcgaaactgcagactctctgggactcacgggtcgggaaaggtacacgatccacattcccgaacaccttaagccccgcatgaaggttcagataaagctggacaccgggaagaccttccaggccgtgatgaggttcgacaccgacgtggagctcacttacttccacaatggaggcatcctgaactacatgatccgaaagatggcccagtaggtgctggcctctcaggagacccgcgcttggtgctagacccaatgaggtaccaggcctccgctggtggaggcctgcgagcagccacctctacttctcgtgagggtgctagcaagatgagcaagtgggccctgccattcctggaggctcagcggcaggagtctctagttcggtgatttgttaatcttttatccttttctgtaatccggaatctagaatcatgggaaggtccatagtcccaaagagagctaccttctctttaaagtcactcatcaccggtcattgatttttttcactctgactaatcttcagcagaactagccagtatctcagaagtgtctcctaccctttctgttactctgtctgtctgtgctcagtgacacccttccctggagagcccattcctccgtgtatcacaccagtgttaacgacatagcttcagactctgtcacacttcaaattcatagtaatctgtgtgatcccttccttccaagtgagcgaagaccttgtggcatggctggccgtcccaagtgtttgattacctaccttccaatcaccgtgagttgtcttttaccattttcaacatttgttgacagggtttgaaagtaaccggggagcgagacaggatttctaattgaataagattaaatatattttcatg

SEQ ID NO: 951 - DNA, 1112 bp, Rattus norvegicus
  Genbank Accession No. NM_017326
ttagtccgagtggagcgagcgagtcgagtggttgtctgttctggtctcggaaaccggtagcccttgcagcatggctgaccaactgactgaagagcagatcgcagaattcaaagaagctttctccctatttgacaaggacggggatgggacaataacaaccaaggagctggggacggtgatgcggtctctggggcagaaccccacagaagcagagctgcaggacatgatcaatgaagtagatgccgacggtaatggcacaatcgacttccctgaatttctgacaatgatggcaagaaaaatgaaagacacagacagtgaagaagaaattagagaagcgttccgtgtgtttgataaggacggcaatggctacatcagtgcagcagagcttcgccacgtgatgacaaaccttggagagaagttaacagatgaagaggttgatgaaatgatcagggaagcagacatcgatggggatggtcaggtaaactacgaagagtttgtacaaatgatgacagcgaagtagagaccctgtacagaaggtgttaaatttcttgtacagaactgttaatttgccttttctctgtttgtaacttatctgtaaaaggttccccaattgtcagaacatgcatgtatagtaattaggattcattcttccatgttttttccctatcttctgtcattgtccttcaaccttattttagaaaagtgatcaagtaccatgttgcatgtggcttctctggatatatctaagccttctgcacatctacacttagatggagttggtcaaagggaacatctgggttatgaccttttttacagtagcttttaggaaccgtcggcatgttgctgttgaagtgtggagttgtgagcgtggactgtggacagtcgacagcgtgtactaagagttgcactactgcaagcgggtgttctgtccggtactcactcgtacactatttttttgtactgctggtattgtaccagaaacattttcttttattgttacttgctttttaaactttgtttagccacttaaggaagatctgcttatggcacaatttgcctcaaatccattccaagttgtatatttgttttccaataaaaaaaaatgacaattt

SEQ ID NO: 952 - DNA, 4871 bp, Rattus norvegicus
  Genbank Accession No. NM_017336
ttttaagcgccacggggacccgctggcgctgccatccctcccgggttcctggtcgcgccacgatggggcacctgcctagggaaaggcgcgggggccgccgcctgctacctctgctcgggctctttgtgctgctcaagattgtttcaacgttccacgtgactgtccgagacgacaacaacatcgttgtgtctttagaagcttctgatgtagtcagcccaacctccgtgtatgttgtgagggtagctggcgaatccaaaaactatttcttcgaatttgaggaatccaatggcacactgcctcctcctgtggtctttaaggccacgtatcatggtctttattacatcatcagtctggtggtagtcagtgggaatgtggtcaccaaaccatcccgatcaatcaccgtgctgacaaaacccttgcccgtaaccagtgtgtctatatatgactataagccttctcctgagacaggagtactgtttgaaattcactatccggaaaaatacaacgtgttcagcagagtgaacatcagctactgggaggggaaggatttcaggacgatgctgtacaaagacttcctgaaggggaaaaccgtgtttaatcactggctcccggggatctgctacagtaacatcactttccagctggtttctgaggcgacctttaacaaaagcaccctggtggagtgcagtggtgtgagtcacgaacccaaacaacacagaacagcgccgtatccccctcgaaacatctctgttcgctttgtcaacttgaacaagaacaactgggaagaaccaagcgggagcttccccgaggactcgttcatcaaaccgcaagacgcgataggaagagacagacccttccatttccccgaggaaacccctgagacgcccgccagcaatgcgtcttccggctggcctgacccgaacggcactgagtatgagagcacatctcagccctactggtgggacagtgcatccgcggcccctgaaaacgaggaggacttcgtcagcgtgctgccagcggactatgacactgaggccacgctcggcaggacagagaaacccacagctgaccctttctctgccttccccgtgcagatgactctgagctggttaccaccaaaaccgcctacagccttcgatggcttcaatatcctcatagagagggaagggaactttaccgactatttgacagtggatgaagaagcccacgagtttgttgccgaactgaaggagcctggaaagtacagactctcagtgacaaccttcagctcctcgggagcctgtgagactcggaaaagccagtcagcaaaatcgctcagcttctacatcagccccacaggagagtggattgaagaactgactgagaaaccgcagcacgtgagtgtccacgtcttaagctcaaccactgccttgttgtcgtggacatcttcccaggagaactacaacagcaccattgtgtctgtggtgtccctgacatgccagaaacagaaagagagccagcggctggagaagcagtattgtacccaggtgaactcaagcaaacctgtaattgagaacctggttcccggtgcccagtaccaggttgtgatgtacctaagaaaaggccctttgattgggccaccttctgatcctgtgacatttgccattgttcccacggggataaaggatttaatgctctatccattgggtcccacggcagtagtgctgagctggacccgaccttacttgggagtgttcagaaaatacgtggttgaaatgttttatttcaaccccaccaccatgacctccgagtggacgacctactacgaaatagcagcgaccgtctccttaacatcgtccgtgagaatagcaaatctattgccggcgtggtactacaactttcgcgtaaccatggtgacgtggggagatccagaactgagctgctgtgacagttccaccatcagcttcataacggcccccgtcgctccagaaatcacgtctgtggagtacttcaacagcctgctgtacatcagctggacctacggggacgccaccactgacctgtcccattcgagaatgctacactggatggtcgtggcagaagggaggaggaaaattaaaaagagtgtgacacgcaatgtcatgacggccatccttagcctgcctccaggagatatctacaacctgtctgtcacagcctgcactgagagggggagtaacacctccatgctccgccttgtcaagctagaaccagctcctccaaaatcactcttcgcagtgaacaaaacgcagacatcggtcaccctgctttgggttgaggagggcgtagctgatttctttgaagtcctctgtcagaagctcgggtctggccacgatggcaaactccaggaaccggtagctgtttcctcccacgtggtgaccatctccagcctcctcccagccactgcctacaactgcagtgtcaccagcttcagccacgacagtcccagtgtccctacgttcatagctgtctccacaatggttacagaggtgaaccctaatgtggtggtgatctcggtgctggccatcctcagcatacttttaattggactgctgttagtgacccttgtcattctgagaaagaagcacctgcagatggccagggagtgtggggctggcacgtttgtcaattttgcatccttggagagggaagggaaactcccctacagttggcgtaggagtgtctttactttcttaaccctgctgccctcatgtctgtggactgactatctgttggcattttatattaacccttggagtaaaaatggcttaaagaagaggaaactgacgaaccctgttcagctggacgattttgattcttacatcaaggacatggccaaggactctgactataaattctctcttcagtttgaggagttgaagttgattggactggatattccacactttgctgcagatcttccgctgaaccgatgtaaaaaccgctatacaaacatcctgccgtacgacttcagcagagtgaggctggtctccatgaatgaagaagaaggagcagactacattaatgccaattatattcctggctacaactcacctcaggagtacattgccacccagggaccactgccggaaaccagaaatgatttctggaagatggtcctgcagcagaagtctcgcatcattgtcatgctcactcagtgcaatgagaaaagaagggtaaaatgcgaccactactggccattcacggaagaacccattgcttatggagacatcaccgtggagatggtctctgaggaagaacaggaggactgggccagcagacacttccggatcaattatgctgacgaggcccaggatgtgatgcactttaactacacggcctggccagaccatggcgtgcctccagcaaatgctgccgagagcatcctgcagttcgtgtacactgtccggcagcaagccaccaagagcaaaggacccatgatcatccactgcagcgcgggcgtgggacggacaggcaccttcatagcccttgacaggctcttgcaacacatccgagatcacgaatttgtggacatcttggggctggtgtcagaaatgcgctcataccgaatgtcgatggtacagacagaggagcagtacatcttcatccatcagtgcgtgcagctgatgtggctgaagaagaagcaacagttctgcatcagtgacgtcatctacgagaacgtcagcaagtcctagttcagactcgggagcggtgaggccatgatgtctacccatcctcccttgcttccagaggttttataggggcctttagtcactttgtcaaatcgcgtccccgctgcgcagtttgtggacaaggaggtgatttaacctcctagaaccgagaagacttagccttaaggagcctacaataccgtttggagtcttttcacttctagacgtttgatggtccaaattcactaggatttccagaaatgctcctcctcgaagggcgggaagtgcccttcctgatggttcagtcggctctttgctgcttgggctgggtttggttttttcttttttttaagtgcaataatttctgtataatcgtgattttttttttacattcgcaattcagaatgttgaattgttatccgcccacatcactgatcagtgccacagccttgggaaggccttatcgcagagttttatctcaccactgaagaggcatggctacacacaggaagactcggtgacaaatcctcaaaggaaatgagcgcgtgtgtccctccctccaacctctcgaagctatgggtcaggagtaggtgggcagagagagaagagaggggttctactcacacgtcagccggtttatctcttcctatttcgaatatgagaacctgtgtttcgaagtagagtaggaaaaacattacttgtctgacttgtcgtagtgggtttcttccttgttgacagttgggagtttcttccgtggctcttttgaactagtgtcactgtcatggtccttttcaaacagccagagctgactcaacagttttgagtctgactctgaactctgagaaatcttggtgcctagccttctttatttttctgtccacccgtgtacacaagaacagtttctccaagagctataggctgtaaaaatgcactttctttccccacccagaggagctgggaattcagaagtcaggacaacgaactcagcatgctaggacagtcactggacaccgtcccttaagaataccgttgagcgtctccgtggattccgacaggatattctctgggttctttgcatttctgttgtcagactcattttaacccgtgtagctagtggcattttattctttggattttgtatgattaaagtacatgattatgtgttgtgaccagcgccgcgaa

SEQ ID NO: 953 - DNA, 3741 bp, Rattus norvegicus
  Genbank Accession No. NM_017340
acacgggtcgttgctttggtgtctgtcacttctgtcgccacctcctctgccaacaccaacactgacctccgtcatgaaccccgacctgcgcaaggagcgggcctccgccaccttcaatccggagttgatcacgcacatcttggatggcagtccggagaatacccggcgccgtcgagaaattgagaacttgattctgaacgacccagacttccagcatgaggactataacttcctcactcgaagccagcgttatgaggtggctgttaagaagagtgccaccatggtgaagaagatgagggaatatggcatctcggaccctgaagaaatcatgtggtttaaaaaactatatttggccaattttgtggaacctgttggcctcaattactccatgtttattcctaccttgctgaatcagggcaccactgctcagcaggagaaatggatgcgcccgtcccaagaactccagataattggcacctacgcccagacggagatgggccacggaactcatcttcgaggcttggaaaccactgccacatatgaccccaagacccaagagttcattctcaacagccctactgtgacttccattaagtggtggcctgggggacttgggaaaacttccaatcacgcaatagttctggctcagctcatcactcaaggagagtgctacgggttacatgcctttgttgtccctatccgtgaaattgggacccacaagcccttgccaggcatcactgtcggggatatcggtcccaaatttggttatgaagagatggataacggctacctgaagatggacaattaccgtattcccagagagaacatgctgatgaaatacgcccaggtgaagcctgatggcacatatgtaaagcctttgagtaacaagctgacgtatgggaccatggtttttgtgaggtccttcctcgtgggaaatgcagctcagagtctgtccaaggcttgcacaatcgccatacgatacagcgctgtgaggcgccagtctgaaatcaagcaaagcgaaccagaaccacagattttggattttcaaacccagcagtataaactcttcccgctcctggccactgcctatgccttccacttcgtaggaaggtacatgaaggagacctaccttcgaattaatgagagcattggccaaggggacctgagtgaactgcctgagcttcacgccctcactgctgggctgaaggcttttactacttggacagccaatgctggcatcgaagaatgtcgaatggcctgcggcgggcacggctattctcacagcagtgggattccaaatatttacgtcacttttaccccggcctgcaccttcgagggagagaacactgttatgatgctgcagacagccaggttcttgatgaaaatctatgaccaggtgcggtcggggaagttggtgggtggtatggtgtcatacctgaatgacctgccgagtcagcggatccagccacagcaggtggcagtctggccaactatggtggacatcaacagcctggagggcctgacagaagcctacaagcttcgtgcagccagattggtagaaatcgctgcaaaaaaccttcagactcacgtgagtcacaggaagagcaaggaagtagcatggaacctaacctctgtcgaccttgttcgggcaagtgaggcgcattgccactacgtggtcgttaaggtcttctcagacaaactccccaagattcaagacaaagccgtccaagctgtgctgaggaacctgtgtctcttgtattctctctatgggatcagccagaaaggaggggactttcttgaggggagcatcatcacaggggctcagctgtcacaagtaaacgctcggatcctggagctgctcaccctgatccgccccaatgctgttgctctggtggatgcctttgactttaaggacatgacacttggctctgttcttggccgctatgatggaaatgtgtatgaaaacttgtttgagtgggccaagaaatccccactgaacaaaacagaggtccatgaatcttaccacaagcacttgaagcccctgcagtccaagctttgaagtttccctgggacacgtctgagctccacaagcagcagaaactctctcctctactcactaatccttgtgaaatcgtcatcaaatttgtgtagctacagagcaaatgatgggtttcttttcctccctataagtaaagagaaatgaacagactttagagattaaatgagaaattcggtgttgtaagtgcagtaatgcagacagagacgtaggaactcagaaagcttcagagctgtggtctgacttgcatttgtactgctgctaatctcagtaggccttgactctggagaattaacagagttttaactacaaatacttacttattttcacatttttactgctaatcactggatatatgttttttaaacaaaagtgttatatagagtggaattttccaggcattcgtgcctaccactttctgatctactgctaagagcaggagtttgggggccagaaactaatagaaaccttgatgtgggtgtgtggctgtcacacaggccgctgctgcctgccatgtgggtgtgtcacccctattaactgtcacattaacatagtcaacaagaggactccttcaacacccacccaccaagaaaccagagttcccgatgggcacaagcacccactccaggctcagccttcgtggtagtggcactactgtgcctttgaccccactttttgacacagttaagttacttgtcttacctccaggctttcagccattgcctggatttcagtcatggtggctgaccttccctttcttgcttgccttccttctcctgaaagagataaaagagatagtagtcagcctctcctcatagattaagtatatggagagccctcagctatggtattactgtattttggtgactttgttaagtaaatttcctgggacaatcctgatttgaaagattctgtattctgttgcacaagctattaaaatgctcagtggtcaccaaagtatttcacacacacacactcacaaatcactcaggtcaccttttacactagaaataacaggaaagccctggccacagccatctgctgagagtgttagttgagatgtttcgttgaagatggctgaagaaagtgcaggccctggggagtttctccttgctgagagccggctctgtggtgagcccctagcagccttacgaggcggtgaaacggccccttcagatgggagcagcctctacaatcattctgagcttaaaggtgaaatatgcaccttttgtcctataaatgtcctataaatgcttggggggaggggtaatgttttgttttttttttcttgaaacagagcccagaatggccttgaactctgatcctcacagcctggtaaatgctgggcctacaggtgtgcgccgacatgtctggctgatcggagctctttattcttaaaagcacagtagggagatgattgtaacattaagtctgtgtctgtggcattcgcattgtgagagcagttccttagaacagttctgagagcacagcatcaatgtagtgaaaacgatgtcgacgcctgacatgaaatcacaaccctccgggtcatcgacacaagccttaacctttctcctggaatgactggtaatcccttaagattgacagtacacagcatgtcaccttgttggggtttctattgacagtaattcatattctggaaaggaactaataaatataaatgaccg

SEQ ID NO: 954 - DNA, 1139 bp, Rattus norvegicus
  Genbank Accession No. NM_017343
agatttgaaccgccaccatgtcgagcaaaaaagcaaagaccaagaccaccaaaaagcgccctcagcgcgcaacgtccaacgtgttcgccatgtttgaccagtcccagatccaggagttcaaagaggccttcaacatgatcgaccagaaccgggacggcttcattgacaaggaggacctacacgacatgctcgcgtctctggggaagaaccccaccgacgcctacctggacgccatgatgaacgaggccccgggccgcatcaatttcaccatgttcctcaccatgtttggagagaagctgaacggcaccgacccagaggacgtcatcagaaacgccttcgcttgcttcgatgaggaagccacaggcaccatccaggaggattacctgagggagctgctgaccaccatgggtgaccgcttcacagatgaggaagtggatgagctgtacagggaggcccccatcgacaaaaagggcaatttcaactacatcgagttcacgcgcatcctcaagcacggagcgaaagacaaagatgactgaagaggctgcagctgacattcctgttgagtttccttattcacttcatgtctcagacacagcccccataggacctactgtgtgccactttgtgtccctcagacaccccctcccataggcctactgtgtgccgcttagtccctcagacaccccctcccataggcctactgtgtgccacttagtccctcagacaccccctcccataggcctactgtgtgccatttgtccctcagacaccccctcccataggacctactgtgtaccacttggtttctcagacagccccacccccaaacccccctaaggacctactgcgggccacttagtttcacagcctttcctttttttaatgtatttattccagaccctttctgccacttagcatgtgtataatcagactggaatggggacaatgttgtaattgtactgaaaatgagatgcaaataaaaaaatcaaccaatgtgaaagcccaggaaaatatatcggcatttctggttttgctggatttttttacatttttatataataaaaatgttattttgaaataaagattatgctgactcaaggtggagtataaaacaaaaaaaaaaaaaaaaaaaaaaaaaa

SEQ ID NO: 955 - DNA, 1392 bp, Rattus norvegicus
  Genbank Accession No. NM_017365
ccgggatccctgcgcgccgtggtgttctgtgccttgccggtctgttccctccgattgtgcctagcaatgaccacccagcagattgttctccagggcccgggaccctggggtttccgactcgtgggcggcaaggactttgagcaacctctcgccatttcccgggtcactcccgggagcaaggctgctatagctaacttatgcataggagatttgatcacagccattgatggggaagataccagcagtatgacacacttggaagctcagaacaaaatcaagggctgcgtagacaacatgacgctcacagtatccaggtctgagcagaagatttggtctcctctagtgaccgaggaggggaaacgtcacccctacaagatgaatttagcgtcggaaccccaagaagtcctgcacatcggaagtgcccacaaccgtagtgctatgccatttaccgcctcacctgctcctggcacccgggtcatcacaaaccagtacaacagccctaccggcctctactcatctgaaaacatctctaacttcaacaatgcagtggagtcaaagacctcagccagtggggaggaggcgaacagcaggccctcggctcagcctcatccctccggcggccttatcatcgacaaggaatccgaagtttacaagatgcttcaggagaagcaagagttaaacgagccccccaaacagtccacatcattcctggttctgcaggagatcctggagtcggatgggaaaggggaccccaacaagccatcaggatttagaagtgttaaagctccagtcaccaaagtggctgcatctgttggaaatgctcagaagctgcccatctgtgacaaatgtggaaccggcattgttggtgtgtttgtgaagctgagggaccatcatccccaccctgaatgttatgtgtgcaccgactgtggcatcaacctgaaacagaagggccatttctttgtaggggatcagatttattgtgaaaagcatgcccgggagagggtcacaccacctgagggctatgatgtggtcacagtgttccccaagtgatcgagaggacctgccctgtctgctgccctccagcctgcctgctgcacctggttgtcagaatgttctggttctctcctccctgacagtcctgtgcttagtgttagtcctgctcagtaaacattgagtttctcctgtactgactgaccctgactggcagtgtgacacctgcttttacattaccgggaggtggttttgtccctgtcccctcacccacaccacaatgcaccttcttcccttggagtcttccctgctgaaaatggacattggtcacattggaattaagccaaatgttttatctctgatgttactttgttttacttaataaatttagactttaaagcc

SEQ ID NO: 956 - DNA, 2956 bp, Rattus norvegicus
  Genbank Accession No. NM_019123
caacttccatgcccatattacatcttctccttcacacaaaatagggaacagggaaggaaggaaatcagcaaagaatcttcatctaaatgtcctgggagaggctgcctggatcacagtgtggagatgaggtatcaaagcccggatactgatgagtggtatctgcctgtggagtggtccagctgcggggccgaggtgcagcgagccacagggtcgatccatagcgccatggcctgcatcctcaagaggaagcctgcgcttgcggtgagcttcatagccctgtgcatcttgctgctagccatgcgccttgccaatgacgtgactttccctttgctcctgaactgctttggacaacctaaaaccaaatggatccctttgtcctacacactcaggcagcctcttcaaactcactatggatacataaacgtgaggacccaagagcctttgcagctgaactgtaaccattgtgccgtcgtgtcgaactcgggtcagatggttggacagaaggtgggggaagagatagaccgtgcgtcctgcatctggagaatgaacaatgcccccaccaagggtttcgaggaagatgtcggctacatgacgatggtccgagtggtgtcacacaccagcgtccctctcttgctgaaaaacccggactattttttcaaggaggcgagcacaaccatttacgtcatctggggccctttccgcaacatgaggaaggacgggaacgggatcgtgtacaacatgctaaagaagacggtcgacgcctacccagacgcgcagatctacgtgaccacggagcagcggatgacgtactgcgacggggtgtttaaggatgaaactgggaaagacagagtccagtctggctcctatctcagcaccgggtggttcacctttatcctggccatggacgcctgctacagtatccacgtctacgggatgataaatgagacctactgcacgacagaagggtatagaaaagtcccctatcattactatgaacaagggaaggacgagtgtaacgagtatcttctccatgaacatgccccatacgggggacacaggttcatcaccgagaagaaagtgtttgccaagtgggccaagaaacacagaatagtatttacacacccaaactggacagtgtcctgatgctgtgcttcctgaccgtgacactgcagctgtgaggaagagaggttgatggtggtgacagtgcgggcaggatgctcatggtgaccatggtcctggacattctctgtggggacactgactctgctagtaatttgaactttggcattctgtgggagggggtcatgttcattctggtccttctggtggttcagccctgcgaattgcactttaaaacttacctacaactgaaatgaaggctgtgactaaagaaaacacgaagattacctttcaagatggctgctcagaattctttaacagaggcttccaggactcacgattcagcctgctcaggcaaggttactgagtgcatgggctgctccccatcttggaaaatggtggactgtcataatacactgtccccaagcaattctttcagggtagagatatcttgccaccgttaccagttaccctgatagaggggaggtatctctttctgctctgccatctttcttccatatgtctctcatctaaagcctcaggccacctaactaaatgtagcaatgaaggcattctgtaattcctgcatatcaggattgctggactgtctcagagacttaattcaaaatgtatcaaatagcaaatattgacaatttttcacttggacagctgtgctctcactactcaaaacaatgtaactaaacatattactacaattacctacattaatgtttagttatttttggttgagtgctaaacattaacaggttagatatactgctacactgtaataacacatactgtgaaagcatttcttgaaaataaccaaagggttcctcactcttcttcaacactcagtaccaagaaatgagatgctctttgaaaccacaaaacaggggaaagcaagacatatttttgcatcaatttgtatcctatcatattcataatatatatttttaaattcaaatttctattttataagctgaaggtgtacctctctccatagacattatcaatgtcaagtgccaaacggtagatatggaaccttctttatatcatcaaacccagcccaagcttttgccttcatagggctgattgtcccttaggttgccgtatgttctgctagaaaagtaaaatggtcatgagcttcattcccaaagtgcttcgctatgcttcacataggctatgtaccacgtgacgcccatggccacctccctggactattgcctgcacattctgccatccccagcagctgatctgcattgttggctgtgttcatgtgtcccaggtcgctctagttcagaatataggtatagaatagcatttgtgtaaatcagtaaacgactgagttctctgccaagcacagcatagcataccgagattatgcaaaatggccacaaggacggccgtgtcatagatcagtaccctataagcttagataccttcaatgtttttgcttctgttcgatggctctctgttccagagctcggggacaatggctaggaatggtagcagagaaatacagtttccaggtctagacctgagacggctttcttctctgtagactcaatgatccttaaatattagaggttgattttctgagacacttccaagcatccataaataccttggcacaatgattcaaagctaaaaccaagctgcattgagtgttttagagctggaaatgacaaaacacctcacctgtgccacctcgacagggctttcctacgattaagggctatgctaactcattaagatgtgcatctttcctaccctctgcacccattttgatatcccacaccccgacccataagctttgcccagccccactcgtgcc

SEQ ID NO: 957 - DNA, 1004 bp, Rattus norvegicus
  Genbank Accession No. NM_019131
cttagccgcagggggcgccggcgttgcaaagcgggcctgggcgggacgaaccggacctggctccgtaactgcaggagcccagcagtagcagctgcagagcgcggaggcagagcacagcctcagccgccgcctcgccatggcgggtagcagctcgctggaggcggtgcggagaaagatccggagcctgcaggaacaggcagatgccgcggaggagcgtgcgggcagcctgcagcgagagctggaccaggagcggaagctgcgggaaaccgctgaagctgacgtagcatctctgaacagacgcatccagctggttgaggaggagttggatcgcgctcaggagcgtctggccacagctctacagaagctggaggaggctgagaaggctgcagatgagagtgagagaggcatgaaagtcattgaaagccgagcccaaaaagatgaagaaaagatggagattcaggagatccagctgaaagaggccaagcacattgctgaagatgctgaccgaaagtatgaagaggtggcccgtaagctggtcatcatcgagagcgatctggagcgtgcggaggagagggctgagctctcggaaggcaaatgtgccgagcttgaagaagagttgaaaacggtgacgaacaacttgaagtcactggaggctcaggctgagaagtactctcagaaagaagacaagtatgaagaggagatcaaggttctctctgacaagctgaaggaggctgagacccgggctgagtttgcagagagatcagtaaccaaattggagaaaagcattgatgacttagaagataagtttctttgcttctctcctcccaagactccttcatcaagccggatgtcccacctctctgagctctgcatctgtctgctctccagctgacccaggtttctttctagtgcccacccaccctagggccaggcacagaccgtgctttctattgtacagaggtgatcctcccagtgtaaaataaacactgtacgctagtcctgtt

SEQ ID NO: 958 - DNA, 4595 bp, Rattus norvegicus
  Genbank Accession No. NM_019134
cagaaggcggctgaatgggaggcagctttgggaatcattctgaagattacatgggagaccacatatcaacattacagcaggaatccagctatcgggtcgtctagatccaaaaccaagtgctcggtattgtaaccctacgattctctattttgaagcagaagtaggttaaaacaccaaccactgtaaaataggtagttcaaagtagattttggaagatgtcagtcaacatcccttccaactcagtgcccagtggtgccagtcgtttccaagtccatgttataaatgagggccatggcagtggtgcagccatgagtgacagcacggaccccccacattatgaagagacctctttcggggatgaagcccaaaacagactgaaaatcagctttaggcctgggaatcaggagtgctatgaaaattttctccaaactggagagactgctaaaacagacaccacgtttcacgcctatgactctcacacaaacacatattacctacaaacctttggccacaacaccatggacgccgtccccaagattgagtactaccgcaacaccggcagtgtgagcgggcccaaggtcaaccggccgagcctgcaggagatccacgagcagctagctaagaatgtggctgtggcccctggttcagctgacagggttgctaatggagatgggatgcctggagatgagcaagcagaaaacaaggaagaagacgtgactggtgttgtgaagtttggatgggtgaaaggtgtgctggtgaggtgcatgctgaacatctggggagtcatgctcttcattcgcctctcctggattgtaggagaagcgggaattggtctgggagtcatcatcattggcctgagcgtggtagtgacaacactcacaggtatctctatgtctgctatttgcacaaacggagtggtgagaggaggtggagcctactacctgatttcccggagcttagggcctgagttcggtgggtcaataggcttgatttttcgtttcgccaatgcagtgcgtgtcgctatgtatgtggtggggttcgcggagactgtggtagaccttcttaaggagagtgattcaatgatggtggatccaaccaatgacatccgaataatcggttccatcacggtggtgattcttctagggatctcagtagctgggatggagtgggaagctaaggctcaagtgattctcctggtcattctactcattggtatcgcaaacttcttcattggaactgtcatcccatccaacaacgagaagaaatccagaggcttcttcaactaccaagcatctatatttgcggaaaactttgggccaagcttcacagagggagaaggcttcttctcggtctttgctatctttttcccagctgctactgggattcttgctggtgccaacatctctggagacctggaggatccccaggacgccatccccagagggaccatgctggccattttcatcaccaccgtcgcctacataggtgttgctatttgcgtacgtgcctgtgtggtccgagacgccactgggagcatgaacgacactgtcgtttctgggatgaattgcaatgggtccgcagcctgcggactgggctacgacttctcaagatgtcagcatgagccatgccagtatgggttgatgaacaattttcaggtcatgagcatggtgtccgggttcggccccctcatcaccgcagggattttttcggcaacactgtcttcggccctagcctccctcgtcagtgcacccaaagtattccaggctctgtgcaaggacaacatcttcaaaggacttcagttcttcgcaaagggctatgggaaaaacaacgagcccctgagagggtacttcctcacttttgtgatagccatggcattcattctcatcgccgagctgaacgtcattgcacctatcatatccaacttcttcctggcctcatatgcgcttattaatttctcctgcttccatgcctcgtatgccaaatcgccaggatggaggccggcatatgggatttacaacatgtgggtatctctcttcggagccattttgtgctgtgcagtcatgtttgtcatcaactggtgggcggctgtcatcacctatgtcattgagctcttcctctatatctatgtgacttataagaagccagatgtgaactggggctcctccacacaggctctgtcctacgtgagcgctttagacaatgctctggaattaaccacagtggaagaccatgtgaaaaacttcagaccccagtgcattgtcttaacaggaggacccatgacaagacctgctctcctggacataacccatgcctttacgaagaatagtggcctctgtatctgctgcgaagtcttcgtgggacctcgcaagctgtgtgttaaagagatgaacagtggcatggctaaaaagcaggcctggctgatgaagaacaaaatcaaggctttttatgctgcggtggcggcagactgcttcagggacggtgtgcggagtctccttcaggcctcaggcctggggagaatgaagccaaacactctagtgattggatacaaaaagaactggaggaaagctcccttgtctgagcttgagaattacgtgggaatcatacatgacgcctttgactttgagattggtgtagtcatagtcagaatcagccaagggtttgacatctctccagttctccaggtacaagatgaactggagaaactggaacaggagagactggctctggaggccgcaatcaaagacaacgactgtgaggagggcaaggggggcatccgaggcttgtttaagaaggccggcaaactgaacattaccaagccggcccctaaaaaagacagcaacatcagcaccatccagtcgatgcacgtcggggagttcaatcagaagctggtagaagccagcgctcagtttaaaaagaaacagggaaaaggcacgatcgatgtttggtggttatttgatgatggagggttgacactgcttatcccatatatcttgactctcagaaagaaatggaaagactgtaagttaagaatctatgttggaggaaaaatcaaccgcattgaagaggaaaaaatttcaatggcttctcttctcagcaaatttaggataaaatttgcagacattcatataattggagacatcaacattaagccaaacaaagagagctggaaagtctttgaagagatgattgaaccttataggctccacgaaagccacaaagatttgaccactgctgagaaattaaaaagagaaagtccatggaaaattacagatgcagaactggaagcagtcaaggaaaagagttaccgccaagttcgactgaacgagctgttacaggagcattccagagccgccaacctcatcgtattgagccttccagtggcgagaaaaggatctatttcggatttgttgtacatggcgtggttagaaatcctgaccaagaacctccctcctgtgctactggttagaggaaatcacaagaatgtcctgacattttactcttaaagcgcgagggatgagaaatgttgtaccttggtgtccgaataattacaaaacgtgtctggtactttgtgttttaaaacctcatctatgaatatacaaacctctggagactatcccacctgattctacataaatttcatcttttttaaaaaagttattattaatgagagttttttcccaccagttttaaaaacatcgaaaacatttttcccttgtcgctggtgaataagaaattaataagagctggctgacatgcttgcaggatgtgctaatgtagatgagctccaggcaaacgcaatctcttgtttccgtggattcttctgcatggccccgtgcaggccacaggcccatagcgggctctctttaagttgttattgacagactggtgtggtgaaagcaggcggctatcatagggaaagacacactgggtcagtggcctgattctgcttggcctcctgagaagtttgtggagatttaaaaatcaatatccggaaactgtaagaaggactagagtctacaaagtgttcaaagcagttacctaaattaaggtttatttaatgcagccgataataagcttaacctctgatcacacgtagcttcgattcgctgctagccagaggtacactaggtaggtgagcaaagacacatgttccacttagacgaaatagagtcccaacatacaaatatcaattgtcttcctggttaaatgttttgaaatttctaccttaatactactttatcttttttctctgattaagtggtttgcatagacgaaataaaaatagacgatctcattgaaaaataatctcacaggtttccaatccactactaaaaatatatccagatcctacatttatttacttctctatatacaggtatatgggttttatagaataacaaggatataagtggagaacttgtaaaaatttttaaaaaccacaggtgttgatttttcttcttgttcgtgtgtgtataatatttaatcacagaaaaaatgcttatatgataaatggcttggttttggttttgttggcatattttgactgttctggggaagcttgtggggggcaaatcaacctgaaataaaattctact

SEQ ID NO: 959 - DNA, 1116 bp, Rattus norvegicus
  Genbank Accession No. NM_019136
atgctcctggtgtctaccgtgtccgctgtgcctgggctcttttcaccccctagctctcccagcaacagcagccaggaggaactactggatgaccgagacccgctgctagtccgggctgaactggccctgctatctacaatttttgtggctgtggccttgagcaatggcctagtgctgggggccctaatacggcggggccggcgtggacgctgggcacccatgcatgtcttcatcagtcatttgtgcctggctgacctggctgtggctctgtttcaagtgctaccccagctggcttgggatgccactgaccgcttccatggccctgatgccctgtgtcgggccgtcaagtacctgcagatggtgggcatgtatgcctcctcctacatgatcctggccatgacactagaccgccatcgtgccatctgccgccctatgctagcataccgccatggaggtggggctcgctggaacaggccagtgctggtggcctgggccttctcactccttctcagcctgcctcagctcttcatctttgctcagcgtgatgtgggaaatggcagtggggtgtttgattgctgggcccgatttgcagaaccatggggccttcgtgcctatgtcacctggattgccttgatggtgtttgtggcacctgccctaggcattgctgcctgtcaggttcttatcttccgggagatacacgccagtctggtgccagggccatccgagagggcagggaggcgccgcagagggcgccggacaggaagccccagcgagggagcacatgtatcagcagccatggccaagaccgtgaggatgacactggtgattgtgattgtctacgtgctatgctgggcacccttcttcctcgtgcagctgtgggcagcgtgggatccggaagctcctctggaaagacccccctttgtgttgctcatgctgctggctagccttaacagctgtaccaacccttggatctatgcttccttcagtagcagtgtctcctcggagttgcgtagcctgctttgctgtgctcagaggcacaccacacacagcctgggtcctcaagatgaatcctgtgccacagccagctcctctttgatgaaggatacaccctcctga

SEQ ID NO: 960 - DNA, 2145 bp, Rattus norvegicus
  Genbank Accession No. NM_019137
agcccggttgcactttggagaaaccaggagccgccgcccgaggcaggtgcgggcgagccagggcgccgcggccccccaaccctcgtccccgagccaagcgccgggagcctggagctggggcgcccggattccctgccagccacgcgcgccccagcccagcgaggccccgggcgccccgccgccaccacgccatgctccacctgagcgacttctccggccccgacgcgctcctctccaagcccaccgaaggctgcgcccacaccagccccgagctgccccggctgcctgctagggacgctccctcggccgccgcgtatcctggaggcgacttcttgagctgggctctgagcacctgcggcgccgggggggacttaacagactcctgcttcctggagggccctgcacccacgcccccttcgggcctcagctacagcggcagcttcttcatccaggcggttcccgaacacccgcacgacccggaggccctcttcaacctcatgtctggcatcttgggcttggcacccttccctagccccgaggcggcagcgtctcggtcccccctggatgtccctttccccgcgggtcccgatgccttgttgccggacctttactccccggatctgagttcggccgccttcccggaggcgttttgggaggccgcgccttcggcgggcgctccctcgcagtgcctgttcgagccccagctctccccgcccgacgtcaagcccgggctgagggcgcctcccgcttcgccagcgctggacgctgctgcttcggccttcaaagggccctacgccccctgggagctgctgtcggccggggctccggggaactgtgggtcgcagggaagcttccagaccaccccggaggcacgcttttccgccgtggggaccaaggtcgaggacctgctgtccatcagctgccccgccgagctgcccggtccggctagcagactctacccgccaggggcctacgatgccttctcgctggccccaggtgacttaggggaggggaccgagggcctcccggcgctgctgacccctccgggcggggagggagggagcggcggcgaaggcggagagttcctggccgtccctcaagcgcagctgtccccgctgggcctgcgcggcgccgccacggcagacttctccaaagccctggtggccgacctcccggggggcagcggagtggcggcgccttcatcccccgccacctccttccccgcggccaaagcccggcgcaagggacgccggggcggcaagtgcagcgcgcgctgcttctgcccgcggccgcacgtcaaggccttcgcctgccccgtggagagctgcgtgcggacgttcgcgcgctccgacgagctcaaccgccacctgcgcatccacacgggccacaagcccttccagtgccgcatctgcctgcgcaacttcagccgcagcgaccacctcaccacgcacgtgcgcacccacaccggcgagaagcccttcgcctgcgacgtgtgcggccgccgcttcgcgcgcagcgacgagaagaagcgacacagcaaggtgcacctcaagcagaaggcgcgcgccgaggagcgcctcaagggcctgggcttctactcgctgggcctctctttcgccgcgctgtagccggagctggctccgtaggtcggcgccgccggccgtcggcgcacgcgacacggtcctgccgctccctcgtccctgctgccttccctgcctcttccacgcacgtccggggccacccgcagcccagctccagttcccccgaagcgcccgccgctcacgcccttcagcacgggctccgcggacagcgcccgctgttttcggagccgccttcctctagccacccgctctggggactgtcctctcggtccacccacagagcaggcgataccttaggactgaagagagtttttgtaactggcgtacgccccacgccttcctctttatcccttcccagagtcaagctggggatgtaccgagccggtctctcaagaactttgtacagcaagtccagcaagcctttggatgtgatgtctttgctttggggttatttcctttttgttgtcgttcattttttgtaaagcagacgctactctcaagcatttgacaaaactgtttatttttgcaattaaaattattgtgc

SEQ ID NO: 961 - DNA, 5575 bp, Rattus norvegicus
  Genbank Accession No. NM_019147
gtttttttttttttttttcctcccctccctcccccgcgtttcatgcagctgatccgaaagggaataaaaggctgcgcataatcataatataaaagaaggggagcgcgagagaaggaaagaaagccgagaggtggaagaggggggagcgcctcaaagaagcgatcagaataataaaaggaggccgggctctttgccttctggaacgcgcggctcttgaaagggcttttgaaaagtagtgttgttttccagtcgtgcatgctccaatccacggagtatattagagccgggacgcggccgtcgcgggggcagcgacgacggcagtcctcggagggagcaccagcgctagcagcggcggcggcgtccggagtgccccccgcgcggcagcgatgcggtccccacggacgcgcggccggccggggcgccccttgagccttctgctcgccctgctctgtgccctgcgagccaaggtgtgcggggcctcgggtcaatttgagctggagatcctgtccatgcagaacgtgaacggagagttacagaatgggaactgttgcggcggagcccggaaccctggcgaccgcaagtgcacccgcgacgagtgtgacacgtacttcaaagtgtgcctcaaggagtatcagtcccgcgtcacggccgggggaccctgcagcttcggctcagggtctacgcctgtcatcgggggcaataccttcaatctcaaggccagccgcggcaacgaccgtaatcgcatcgtactgcctttcagtttcgcctggccgaggtcctacactttgctggtggaggcatgggattccagtaatgacactattcaacctgatagcataattgaaaaggcttctcactcaggcatgataaaccccagccggcagtggcagacactgaaacagaacacagggattgcccactttgagtatcagatccgagtgacctgtgatgaccactactatggctttggctgcaacaagttctgtcggcccagagatgacttctttggacattatgcctgcgaccagaatggcaacaaaacctgcatggaaggctggatgggtcctgagtgtaacaaagcaatatgccgacagggctgcagtcccaagcatggctcctgcaaactcccaggtgactgcaggtgccagtatggttggcagggcctgtactgtgataagtgcatcccgcacccaggatgtgtccacggcacctgcaatgaaccctggcagtgcctctgtgaaaccaactggggtggacagctctgtgacaaagatctgaattactgtgggactcatcagccctgtctcaaccggggaacatgtagcaacactggccctgacaaataccagtgttcctgccccgagggctactcaggaccgaactgtgaaattgctgagcatgcctgcctctctgatccctgccacaacagaggcagctgcaaggagacctcctcgggctttgagtgtgagtgttctccaggctggactggacccacgtgttccacaaacatcgatgactgttctccaaataactgttcccatggaggcacctgccaggatctagtgaatggattcaagtgcgtgtgcccaccccagtggactggcaagacttgtcagttagatgcaaatgagtgcgaggccaagccttgtgtaaatgccagatcctgtaagaatctgattgccagctactactgtgattgtcttcctggctggatgggtcagaattgtgacataaatatcaatgactgccttggccagtgtcagaatgatgcctcctgtcgggatttggttaatggttatcgctgtatctgtccacctggctatgcgggcgatcactgtgaaagagacatcgatgaatgtgctagcaacccctgcttgaatgggggtcactgtcagaatgaaattaacagattccagtgtctgtgtcccactggtttctctggaaacctctgtcagctggacatcgattactgcgagcccaacccttgccagaatggcgcccaatgctacaatcgtgccagtgactatttctgcaagtgccctgaggactacgagggcaagaactgctcacacctgaaagaccactgccgcaccactccctgtgaagtgattgacagctgcaccgtggccatggcctccaacgatactcctgaaggggtgcggtatatctcttccaacgtctgtggtccccatgggaagtgcaagagcgagtcaggaggcaaattcacctgtgactgtaacaaaggcttcaccggcacctactgccatgaaaatatcaacgactgtgagggcaacccctgtacgaacggtggcacgtgcatcgacggcgttaactcctacaagtgtatctgtagtgacggctgggagggcgcgcactgtgagaacaacataaatgactgtagccagaacccttgccactatgggggtacatgtcgagacctggtcaatgacttttactgtgactgcaaaaatgggtggaaagggaaaacctgccactcgcgtgacagccagtgtgacgaagccacgtgtaataacggtggtacctgctatgatgaagtggatacgtttaagtgcatgtgtcctggtggctgggaaggaacaacctgtaatatagctagaaacagtagctgcctgccgaacccctgtcataatggaggcacctgcgtggtcaatggagactccttcacctgtgtctgcaaagaaggctgggaggggccgatttgtactcaaaataccaacgactgcagtcctcacccttgttacaacagcggaacctgtgtggatggagataactggtaccggtgcgaatgtgcccctggttttgctgggccagactgcaggataaacatcaatgagtgtcagtcttccccttgtgcctttggggccacctgtgtggatgagatcaatggctaccagtgtatctgccctccaggacatagtggtgccaagtgccatgaagtttcagggagatcttgcatcaccatggggagagtgatacttgatggggccaagtgggatgacgactgtaacacctgccagtgcctgaatggacgggtggcctgctccaaggtctggtgtggcccgagaccttgccggctccacaaagggcacggcgagtgtcccaatgggcagagctgcatcccagtcctggatgaccagtgtttcgtgcgcccctgcactggtgctggcgagtgtcggtcctccagcctccagccagtgaagaccaagtgtacatcggactcttattaccaggacaattgtgcgaacatcactttcacctttaacaaggagatgatgtctccaggtctcaccactgagcacatttgcagcgaattgaggaatctgaatattctgaagaatgtttctgctgagtattcaatctacatagcctgtgagccttccttatcagcaaacaatgaaatacacgtggccatttctgccgaagacatccgggatgatggaaaccctgtcaaggaaattactgataaaataatagatctcgttagtaaacgggatgggaacagctcacttatcgctgctgttgcagaagtcagagttcagaggcgccctctgaaaaacagaacagatttcctggttcctctgctgagctctgtcttaacagtggcttgggtctgttgcttggtgacagccttctactggtgtgtgcggaagcggcggcggaagcccagcagccacacccactctgcccctgaggacaacaccaccaacaatgtgcgcgaacagctgaaccaaatcaaaaaccccatcgagaaacacggagccaacacagtccccatcaaggattatgagaacaaaaactccaaaatgtcaaaaatcaggacacacaactcggaagtggaagaggatgatatggataagcaccagcagaaagtccggtttgccaaacagcccgtgtacacgctggtagacagagaggagaaggtcccccagcgcacgccgacaaaacacccgaactggacaaacaaacaggacaacagagacttggaaagtgcccagagcttgaaccggatggagtacatcgtatagcagacagtgcgtgccgccataggtagagtttgagggcaccccggggcttgtagtttctttaaactgttgtcgtatcccagtctgaggctgttgttgacttagagtcctgtgttaatttaagtttcgacaagctggcttccactggcactggtagtttctgtggttggctgggaaatcgagtgcagcgctcacagctatgcaaaaaccagtgaatgtgcccgggtgtacattcccctgcagccgactcgtcggctcccaggagctgcccaggcctaggcctcggagcttccacatctgccagcggtcctaatggtgatggcagccttaggatcatagttttatttatatttattgactcttgagttgtttttgtatattggttttatgatgacgtacaagtagttctgtatttgaaagtgcctttgcagctcagaaccacagcaactatcacaaatgactttattatttattttttttattgtatttttgttgttgggggaggggggatttgatgtcagcagttgctggtaaaatgaagaatttaaagaggaaaaatgtgtcaaagtagaatttttgtatagttatgtaaataattcttttttattaatcactctgtatatttgatttattaacttaataatcaagagccttaaaacatcattcctttttatttatatgtatgtgtttagaattgaaggtttttgatagtgttggaaacatatggctttttttttttttttttgtgaactttttctcattacgtgttgcctgtaagccaaaagtaaggtgtttggaaatagtttctcttggaaggatgggataggcttcttcccctgggaatactgatggattttttttttttttttttttttttgtacgacgtcaggtgttcaaacacttccttgatagcatcactttaagacacattctaaggactgactgaggcagattgagaattcgtctagaacaggtttttgtttttttctcttttctttttttattttttcctgctttagacttgaaaagagacaggcaggcgatctgtgacagagcagtttaagggaacaaactgagctatgtagtcagaatgtgactggttggatctcattaaaagtatcagattgtgtgaagttggaagcttaccaatcttactttgtaaattctgatttcttttcaccattcgtatgtaatgctgaaccacttgtagatttgatttcattgttgttgtctactgcatttagggagtattctaataagctagatgaatacttgaaccataaaatgtccagttagagcactgtttagattggccatagagtacactgcctgccttaagtgaggacatgaaagtgctattaccaagttcaagatcaaaaaaggcttataaaacagtcatcctggctcaccacggagcccaggaagatactttgtattgtcctattagtgttatatgaacataaaatacatctttgatgtgttgttcctggcaataaattttgaaaagtgatatttattaaattttttgtatg

SEQ ID NO: 962 - DNA, 1267 bp, Rattus norvegicus
  Genbank Accession No. NM_019157
gccaaacccctgccctactgacctctcccctagaggagcacaaggggactcacagccgccctgggcaagaggcaggctctgagtgaggacttagagactgcagagcctcagttcagttacagcttgagcctgccgcagtaatggaggaccagaaacaagattatctgtgatactgacagaggggctgtgagacaaggctaaaaaacagagcagtcacttcagcagagtgagcagggctgcaggtccacccacaattccacaatggccggttctgtgctggagaacatacaatcagtgctacagaagacttgggtgcgtgagttcctggcggagttcctgaatacctatgtcttgatggtgtttggccttggttccgtggctcatatggttctaggagaaaggcttggcagctatcttggtgtcaacttgggttttggtttcggagtgaccatgggaatacatgtggcaggcggcatctctggagcccacatgaaccccgcggtgactttcactaactgtgcactaggccgaatggctggaaggaagttccctatatatgtgctgggtcagttcctgggttccttcttagctgcagctaccacctacttaattttctatggtgccattaaccactatgcaggtgagacactgttggtgacaggtcccaaatccactgcaaacatttttgccacctatcttcctgaacacatgacgctgtggcggggcttcgtggatgaggtatttgtgactgggatgctccagctgtgtatcttcgccatcacggacaagttgaacagtccagcacttcaagggaccgagcccctcatgataggcatccttgtttgcgttcttggggtgtccctaggcatgaacacaggatatgcaatcaacccatcccgtgacctgcctccccggttcttcactttcattgctggctggggcaagaaagtgttcagtgccgggaacaactggtggtgggtgccggtggtggcaccccttctgggtgcctacttaggtggcattgtatacctgggcttaattcacgccggcataccaccacagggttcttagagattggagaattgtacaacaggagaccagaagacgacagcatcgtccaacgatcccctcaccccatctcttctcctccaacttctgcgaaacctaccctacccataagtggttctgtgcctctagcttctagagtacttcttagtagagcttgtctgtgaccacaacccttctgcaataaagcacacctcatacc

SEQ ID NO: 963 - DNA, 1018 bp, Rattus norvegicus
  Genbank Accession No. NM_019169
gtgtggagcaaagatacatctttagccatggatgtgttcatgaaaggactttcaaaggccaaggagggagttgtggctgctgctgagaaaaccaagcagggtgtggcagaggcagctgggaagacaaaagagggcgtcctctatgtaggttccaaaactaaggagggagtcgttcatggagtgacaacagtggctgagaagaccaaagagcaagtgacaaatgttggaggggcagtggtgactggtgtgacagcagtcgctcagaagacagtggagggagctgggaacattgctgctgccactggttttgtcaagaaggaccagatgggcaagggtgaagaagggtacccacaagagggaatcctggaagacatgcctgtggaccctagcagtgaggcttatgaaatgccttcagaggaaggctaccaagactatgagcctgaagcctaagaatgtcgttgcacctactgtcctaagatctgcccaggtgttcttccatggcgtacaagtgctcagttccaacgtgcccagtcatgaccttttctcaaagctgtacagtgtatttcaaagtcttccatcagcagtgatcggagtcctgtacctgcccctcagcatcccggtgctcccctctcactacagtgaatacatggtagcaggctcttgtgtgctgtggatattgttgtggcttcaaacctaaaatgttagaagaaacttaaaacacctaagtgactaccacttatttccaactcttcaccgtttttggttgctgttctcaagaagttgtgatttgctataagacttttagatgtccttaatgattctttctgtctaagaagaatgatgtgctgtgaaatttgttaatatatattttaaaatatgtgagcatgagactacgcacctataaatattaatttatgaattttacagttttgtgacgtgttttattaacttgtgtttgtatataaatggtggaaattaaaataaaataaaaacattatctcattgcaaaaaaaaaaaa

SEQ ID NO: 964 - DNA, 2113 bp, Rattus norvegicus
  Genbank Accession No. NM_019191
gggcagcgcggagcccgtcggaagaggaaggaacaaaaggtccggggcccggctcggacgggccgggaccaggcgctgggtgcagggtagatttaccaggctgtttctgagtgtggattgttacccttggtaagaaaatgtcgtccatcttgccattcactccgccagtggtgaagagacttctgggatggaaaaaatcagccggtgggtctggaggagcaggtggtggagaacagaatggacaggaagaaaagtggtgtgaaaaagcagtgaaaagtctggtgaaaaagctaaagaaaacaggacgattagatgagcttgagaaagccatcaccactcagaattgcaatactaagtgtgtcaccataccaagcacttgctctgaaatttggggactgagtacagcaaatacggtagatcagtgggacacaacaggcctttacagcttctctgaacaaaccaggtctcttgatggtcgtcttcaggtgtctcatcggaaagggctgccacatgttatatattgccggctgtggcgctggccagaccttcacagccatcatgagctcaaggcgatcgagaactgcgaatacgctttcagtctgaaaaaagatgaagtgtgtgtgaacccttaccactaccagagggtggagacaccagtcttgcctccagtcttggtgcctcggcacacagagattctaacagaactgccgcctctggatgactatacccactccattccagaaaacacaaatttcccagcaggaattgagccacagagtaattacatcccagaaacaccaccacctggatatatcagtgaagatggagaaactagtgaccaacagttgaaccaaagtatggacacaggctctccggctgaactgtctcctaccactctctcccctgtcaatcacagcttggatttgcagccagttacttattcagaacctgcattttggtgttcaatcgcatattatgaactaaaccagagggttggagagaccttccatgcgtcacagccctcactcactgtagacggctttacagatccatcgaactcggagaggttctgcttaggtttgctctccaacgttaacagaaacgctactgtagaaatgaccagaaggcatataggaaggggagtgcgcttgtattacataggtggggaagtgtttgccgagtgcctaagtgatagtgcgatctttgtgcagagccccaactgtaaccagagatacggctggcaccccgcgacagtgtgcaaaatcccaccaggctgtaacctgaagatcttcaacaaccaagaatttgctgctcttctggctcagtctgttaaccagggttttgaggccgtttatcagctgactcgaatgtgcaccataagaatgagcttcgtgaaggggtggggagcagaataccggaggcagacagtaacaagtactccttgctggattgaacttcatctgaatggccccctgcagtggttggacaaagtattaactcagatgggatccccgtcagtgcgatgctcaagcatgtcctaaagtccgtcagcagtggagctcattggaagacttaacgtaccaactcctccgccacagtactcgtgtgtgatcccgtggactgtgctagtcaaaacccagagcgaaaacagcacttgaggtctcatcagttaaagcaccttgtggagtctgtttcctacatttgaattttagatgggaaattagtgtctagaaatgccctcccagaggggacaaagaagacttaaagacttaatgatgtctcgttgggcataagacagtgtcccaaaggttattaataccagtagtagttgtgtacagtaacgtgtccagacccagtattgcagtgctctgctgtttgtataccttcttagtgtgcataaatgaggtgtgtgctgctgcttggtctaggcaagcctttataaaattacagtacctaatctgttattcccacttctccgttatttttgtgtcttttttaatatataatatatatatcgagattttcaaattatcatttagaagcagattttccttgtagaaactaatttttctgccttttaccaaaaataaactcgtgggggaagactcgtgcc

SEQ ID NO: 965 - DNA, 897 bp, Rattus norvegicus
  Genbank Accession No. NM_019213
cggcacgaggacgagagcacccgggaagagtcggcgccgctagtgccgggaccaggagcctccgcgagcaagatggccgctcccgagaccgaggccagggggcaggggtactaagtccggacccgcgtgcccttctcccggccgcctgcgccctcatcaagacctcgcgcttctagccaagacatctacatggattattctcgccgtggtcacgaggccgttccaatagagctctagttggcccagattgagaactctggcatttggctgctctgagctggaacctccgggaggtctgctgcaacaggtgcgaccctgaccgctccatgctcgtgggcgcggggaggcgtggcctcccccggggcggccacctctgttggttgctgtgcgctttcaccttaaagctctgcgaagcagaggccccggtgcgcgaggagaagctatcagtgagcacatcaacttcaccatgttggttggtagaagagtttgtggtgaccgaagagtgtactccgtgttctaacttccagattaaaacgacacctgagtgtggttctacagggtatgtggagaaaatcacatgcagctcatctaagaggaatgaattcaaaagctgccgttcagctcttctggaacaacacttattttggaagtttgaaggcatcgtggtgggggtagctttagtcttcgcttgccttgtcatcattcgtcagcgacagctggacagaaaggctcttgaaaaagtccggaagcaaattgaatccatatagctgaatctgctgtgtatggtgggtcccacggatgcatctcagatggagaaagttcagggctaatgtgccctcataagccttgtggtagtgcatcttcaatgactcctcttccaggccattaatgagcaca

SEQ ID NO: 966 - DNA, 1356 bp, Rattus norvegicus
  Genbank Accession No. NM_019220
cccggagctgtcgatcggggacaaagcgcggccgcccgcgccccccgagccgcccgagccggggccagccccccgcgactgacatgatgtttccgcaaagccggcactcgggctcctcccacctcccccagcagctcaagttcaccacctccgactcctgcgaccgcatcaaggatgagttccagctgctacaagcgcagtaccacagcctgaagctggagtgtgacaagctggccagcgagaagtcagagatgcaaaggcattacgtcatgtactatgagatgtcttacggattgaacatcgagatgcacaaacaggctgaaattgtgaagaggctgaatgggatttgcgcccaggttctaccctatttgtcccaggagcatcagcagcaggtcctgggagctatcgagagagccaagcaggtcacggctcccgagctgaactccatcatccgacagcagctccaggctcaccagctgtcccagctccaggcgctggccctgcccctgacaccgctgcctgtcgggctccagccgccatccctccctgcggtcagcgcaggcacaggcctgctgtcactctctgctctgggctctcagacccacctctccaaggaggacaagaacggacacgatggggacacccaccaggaggatgatggagagaagtccgattagctcctggggagagggagggggaggggggataccaggggagacaggcacagagagcacagtgttctgagggccacactgcacacagctcggtccctacccaagcttccacctccagtcctggttccagctgtgcaccctgggcctaggagacgccagagggacagcccaggctacagggaaaattccccaccttcaacatttccccgggctacagccaccaatctcggcccagaatgtacacaacgctagccgcccctttccaccctgtgcaccccgaatttgccccctttccccttctctgcttcctgcactgcacacctgctaggcccagacccctccccccagctcacccagctctggttccctcaaccgcggaaagaaagcattggctcgggactgcagtgggggtgggcaccccacaaacttccctctccccttccccaaataaacgtgagggttaaaagtcggtttgtttattatttctttttcgtcccagtactctatagctaccatctaagagagaaaaagaaggaagccctggagcgagcgagggtctgtctgtgcatatagttagatttttctggtcgcctcgctttgcaccgagaggtggagggccgctgtactgagggtggggtctagctgtgccttcaaaataaaaacatgaaaaggtcaaaaaaaa

SEQ ID NO: 967 - DNA, 1736 bp, Rattus norvegicus
  Genbank Accession No. NM_019242
tctcacccgcgccgctcctcgcctctcttgttagccggagactcgcctctcagccgcccgccgcacagacgcacgagtatacagtgcagctccatcggctgatccttgctgagctccaagtgtaggcggcaccgggcggcccacgatgccgaagaacaagaagcggaacgctccccaccgcggtggcgggggtggcggcggctccggggcagcgacgtcggcggccacgacaggtggcccgcatcggactgttcaacctttcagtgatgaagacgcatccattgaaacaatgagccactgcagtggctatagcgatccttccagtttcgcggaggatggaccagaagttcttgatgaggaaggaactcaggaagacttagagtacaagttgaagggattaattgacctaacccttgataagagtgcgaagacaagacaggcagctcttgaaggtgttaaaaatgcgctgtcttcaaaagtgctgtatgagtttgttctcgagagaagaatgactttaactgatagcattgagcgctgtctgaaaaaaggaaagagtgatgggcagcgcgcagctgcagcgctcgcgtccgttctttgtattcagttgggccctggattggaaagtgaagagattttaaagactcttggaccaatcctaaaaaaaataatttgtgatggaacagcgagtatccaggctaggcagacttgtgcaacttgctttggtgtttgctgttttattgccacagatgacatcactgagctgtattcaactctggagtgcttggaaggtatcttcaccaagtcctaccttaaagagaaagacacgaacgttccttgcagcactcctaatacagtgcttcacatcagctcgcttctcgcatggacgctactgctgaccatatgcccaatcagtgaagtgaagaaaaagctggagctgcatttccataaacttccaagcctcctttcttgtgatgatgtaaacatgagaattgctgctggcgaatctttggcacttctgtttgaattggccagaggaatggagagtgactttttttatgaagatatggattctttgacccagatgctccgggctctggctacagatggaaataaacaccgtgccaaagtggacaagagaaagcagcgctctgtcttcagagacgtcctgagggctgtggaggaacgggattttccaacagaaactgttaaattcggtcctgagcgcatgtatattgatagctgggtcaaaaagcacacctatgacacgtttaaagaggctcttggatcagggatgcagtaccacttgcagacaaatgaattccttcgcaatgtatttgagctggggccccctgtgatgctcgatgctgcaacacttaaaaccatgaagattcctcgttttgaaaggcatttatataactctgcagctttcaaagctcgaacaaaagcccgaagcaaatgccgagataagagagcagatgttggagaattcttctagatgtctgtctttgatgtctgttttctaatttcttcctttattattatttttgctacttctaatgtacataagcttttagagacttttttatcttggtcaacttagataatttttgatgtagggatgggttatattttaatttaatgtacagtgttacaaattaatgagttctttattctgtaaaaataactgataaccacaaataaaagtgtttgtgatgcttggtcaaaaaaaaaaaaaa

SEQ ID NO: 968 - DNA, 1136 bp, Rattus norvegicus
  Genbank Accession No. NM_019262
gggcttcttggacgtttttgggaggggacagcaagggaaggtccttctgcctctagggacccagacttccgctttctgcagacagcagcaggctctgggctctgggaatccactgctgtctggcctagaagcatcatagaacacgaggattccatacacaggaggcccctgaagctgagctgagctgatgaagacacagtggagtgagatcttgacacccctgttgctgctgctcctgggtttgctccatgtctcctgggcccaaagcagctgtactgggtcccctggcatccctggggtccctggcatccctggggtccctggctctgatggcaaaccaggcactccagggataaaaggagagaaagggctccccggactggctggagaccatggtgagttaggagagaaaggggatgcagggatccctgggatcccaggcaaagttggccccaagggtcccgtcggccctaagggtgctccaggcccccctggaccccgcggtcccaaaggtggctctggagactacaaggctacccagaaagtagccttctctgccctgaggacggtcaacagcgccctgcgaccaaaccaggccattcgcttcgaaaaggtgatcaccaatgttaatgataactacgagccgcgcagtggcaagttcacctgcaaggtacctggcctctactacttcacctaccacgccagttcccgcgggaatctgtgtgtgaacatcgtgcgcggccgcgaccgagaccgcatgcagaaagttctcaccttctgcgactatgcccaaaacaccttccaggtcaccacgggtggggtagtcttgaagctggagcaggaagaggttgttcacctgcaggccacagacaagaactccctgctgggcgtcgagggagccaatagcatcttcactggctttctgcttttccctgacatggatgtatgatcacggggtcaaatcactcctatccaaaacctcctccctgccagtaatcctccctggaccccagacactgccctttgactgcccaaagccctgaccagagccctgtagatgttacagaatgggtaaataaactcttcaaggccaagaaaaaaaaaaaaaaaaaaaaaaaaaaaaaaaaaaaaaaccc

SEQ ID NO: 969 - DNA, 3037 bp, Rattus norvegicus
  Genbank Accession No. NM_019269
gaactcacgagcctcgcacgcagaggccctcagcgccccgtttcccgctctgcggtatccccagatccccggacgggtgctgtgggaggctgaggacggcatgcgggactacgacgaggtgaccgccttcctgggcgagtgggggcccttccagcgcctcattttcttcctgctcagcgccagcatcatccccaatggcttcaatggtatgtctatcgtgttcctggcggggaccccggagcaccgttgccttgtgcctcacaccgtgaacttgagcagcgcgtggcgcaaccacagtatcccgttggagacgaaggacggacgacaggtgcctcagagctgccgccgctaccgactggccaccatcgccaacttctctgcgctggggctggagccgggacgggacgtggacctggagcagctggagcaagagaactgcctggatggctgggagtacaacaaggacgtcttcctgtccaccatcgtgacagagtgggacctggtgtgtaaggatgactggaaagccccactcaccacctccttgtttttcgtgggtgtgctgatgggctccttcatttcgggacagctctcagacaggtttggtcgcaagaatgtgctgtttttgaccatgggcatgcagactggcttcagcttcctgcagctcttctctgtgaacttcgagatgtttacagtgctttttgtccttgttggcatgggtcagatctccaactacgtggcagcatttgtcctgggaacagaaattctttccaagtcaattcgaattatattcgccaccttaggagtttgcatattttatgcatttggcttcatggtgctgcctctgtttgcatacttcatcagagactggaggatgctgctgcttgcgctcactgtaccaggggtgctgtgtggggctctctggtggttcatccctgagtccccccgatggctcatctctcaaggccgagttaaagaggcagaggtgatcatccgcaaagctgccaaattcaatgggattgttgcgccttccactatcttcgatcccagtgagttacaagacttaaattccaagaagcctcagtcgcaccacatttatgatctggtccgaacacgaaatatcaggatcatcaccatcatgtccataatcctgtggctgaccatatcagtgggctacttcggactttctcttgacactcctaacttgcatggggacatctatgtgaactgcttcctactggcagctgttgaagtccccgcctatgtgttggcctggctgttgctacagcacctgccccggcggtattctatctctgctgccctcttcctgggtggcagtgtccttctcttcatacagctggtgccttcagaattgttttacttgtccactgccctggtgatggtgggcaagtttggaatcacctctgcctattccatggtctatgtgtacacggccgagctgtaccccactgtggtcagaaacatgggtgtgggggtcagctccacagcatcccgccttggcagcatcctgtctccctactttgtctaccttggtgcctatgatcgcttcctgccttatatcctcatgggaagtctgaccatcctgacagctatcctcaccttgttcttcccagagagctttggtgcccctctccccgacaccattgaccagatgctcagggtcaaaggaataaaacaatggcaaatccaaagccaaacaaggacgcaaaaagatggtggagaaagcccaacggtcctaaagagcacagccttctaacaccctgtccagaaggtgaaaaactgaaaggaaacctgcgtgtagtcagaaatgctctcaatcactgagggctttctgttctgttgaccttgtgtctcacatgctcacggatggggcatctgtcctgaagagccaccttcctccagggccaccaaggctaaccacacacagcttgcacatcccatcacagtgtggactggggcctcccagagaagttactgagtctcttgaagcagtgggacttggaagactgagaaacatctgctagacatgctttgttatcctgtaagacctgatagtcacagacagaacagcaggtctgtttcccctcctttccctaactgaagaacttacaggaaaggaataaaagtgactcagtggtggtgtgcttgtctaggatgcaccagaaggaaacaaaaatttcttttcagaaaataagtgattccatggggagtttgatttctcatcttacctaagttaaccaaaatcctgtgatcattttaacccacaacagaagaacacaagaccaagggaaccctaaaggaaactgaggtgaggctggtacataaagcagacagtgtgtggactgtggctgctctgcccctcagccagctgtactgtgtgtgtctggtcagggtcctgccttgcccagaccctgtgagaaacctactgttgaggccaggcttggcctccactgctgtgtaaatcagaactcaggctgccagacacttggctgtgtcttgagggaaatgtatggataacagagtgttccttccttcttccagcactgtcatgggagtttgtcatctgctgttgtatctcaagctatttgtcctttagcagaaacttgggaactgcctgtgtttcccagctcagggttaccctggctggtgtgcagttgccaatataaatggccttcacagtcttagccactagagcggctctgagtgccaaaaatactaacaccatgcttcttccttttacgatgtgtaatcatgaggaaaatcacaagaaagaaatgtaaattgtgttcacagtctctcagagtcgctggctgcagtcacatcggtggggatttcgtgttcagtgattgtcttctcttctgattatgttgccatggtgctccgaaagcacacgcttcacgctcttaaaatgcaaaacaaacacagaaacccgtattttgtgaaagctactgaagtgccttgggcaaggatatggttttaataaactgatttttttttttaaataaaaaaaaaaaaaaaa

SEQ ID NO: 970 - DNA, 3059 bp, Rattus norvegicus
  Genbank Accession No. NM_019277
ccgcgtcgacccggcacaaacacaccatgcaccctgacagtaaatttataaaaaatttttttcaactatagcacaaaaaatgtgtatcacttaacagggatgacaaatggctgtcacttcagtcactataatgcacaatatatatatgccttctacttatgaagcacgtttactggaaaacaactgttatgcagacggcatcctcatttttcttatgtttggtctcttgtcccttgagagatcatgtccagtaagggatctacaacagttccttgtgtgtgttaacaatgatgaaatcacaattgatgtgttttcctgagtctgtccccacagttaaacaatgcctttctccccggggcgccgcgcccggccggcgcctccgcttccagccaagatggcggagagcggcgaggctctgggtacggtcccggagcacgagcggatcttgcaggagatcgaaagcacggacaccgcctgcgtagggcccacccttcggtctgtgtatgatggtcagccaaatgcacacaagaagttcatggaaaagctagatgcctgcatccgcaaccatgacaaggagattgagaaaatgtgtaacttccatcaccagggctttgtagatgctatcacagagctcctcaaagtaagggcggacgcagaaaagctgaaggtccaggttactgataccaaccgaaggttccaagatgctggaaaagaggtgatagaacaaacagaagatattattcggtgtagaattcagcagagaaatattacaaccgtagtagagaaattgcagttatgcctgccagtgttggagatgtacagtaaactgaaggaacagatgagcatgcagaggtattattctgcacttaaaacaatggaacagttagagaacgtatactttcctcgggttagccagtaccgcttctgtcagctcatgatggacacacttcctaaactccgggaggatatcaaagacatctccatgtctgacctcaaggactttctggaaagcattcgaaagcattctgacaaaataggggaaacagccatgaaacaggcacaacagcagaagagcttcagtattgctgtacagaagcaaaccaatatgaggtttgggaaaaatatgcatgtaaacaatgacaggactctagaggaaaagagtgacatcatactgaagcacacacttgaggaggaggccgagaatgacgaggaggtcttaactgttcaagatctcgttgacttttcccctgtttaccgatgctcacacatttattctgctttgggtgatgaagaaacatttgaaaattattaccggaagcaaaggaagaagcaggcgcgcctggttctgcagccgcagtcgagtgtgcatgaaacagttgatggctatagaagatatttcactcagattgtagggttctttgttgtggaagatcacattttacatgtgacccaaggattagtaaccagggcatacactgatgaactctggaacatggccctctcaaagataattgctgtcctcagagctcactcatcttactgcactgatcctgaccttgttctggagctgaagaatctcatcgtcatttttgcggatactttgcagggttatggcttttctgtcaaccgactctttgaccttctatttgaaataagagatcaatacaacgaaacactgcttaagaaatgggccggtattttcagggacatttttgaagaagataactacagccctattcctattggcagtgaagaagaatataaaatggtcatcagtaaattccccttccaagatccggaccttgaaaagcaatccttcccaaagaagtttcccatgtcccagtcagtgcctcttatttatattcaagttaaagaatttatttatgccagtcttaaattctcagagtcactacaccgaagctctacagaaatagacgatatgcttaggaagtcaacaaatctgctgctgaccaggattctgagtagctgcttactgaacctcattagaaaacctcacataggtttgacagagctggtgcaaattatcataaacacaacacacctggagcaggcttgcaaatacctggaggactttataactaacattacaaatatttctcaagaaaccgttcacaccacaagactttatggactttctacttttaaggatgcacgacatgcagcggaaggagaaatatataccaaactcaatcagaagattgatgagtttgtccagctggccgactacgactggaccatggctgagtcggatgggagagcaagtggttatttaatggatcttattaattttttgagaagcatctttcaagtatttacccacttgcctgggaaagttgcccagacagcttgcatgtcagcctgccaacatctgtccacatccttgatgcagatgctcctggacagcgagttaaagcagatcagcatgggggccgtacagcagtttaacctagacgtcatacagtgcgaattgtttgccagctctgagcctgtgccaggattccaaggggacaccctgcagctggccttcattgacctcagacagctccttgacttgtttatggtttgggactggtctacttacctggctgactatgggcagccagcttccaagtacctccgggtgaacccacacgccgcccttacgcttttggagaagatgaaggacaccagtaagaagaataacatatttgcccagttccggaagaacgaccgggacagacagaagctgatcgagacagtggtgaaacagctcagaggcttggtgaccggtatgtcccagcacatgtagaccagatccatgcccgagtgcttctctgtggccagcaccggtcatgagacaataatttgtttacagaagccaaaaactgtagtagaggaaagatactaatgagggcttaaacaataaggacagcaaacatcatttgtatggacttttaataactgaatactattttatatataaaaatgtaacattaattttttccaattttagaagaaaagtcaaaagtgtaatatataaacccaataaattgtgtatg

SEQ ID NO: 971 - DNA, 3115 bp, Rattus norvegicus
  Genbank Accession No. NM_019280
gttgaacagcagccagagcctgaagaagccaactccagggcggaggaaaggaagcagaaggctcagcaccagtctccaacacttggcaagatgggtgactggagcttcctgggggagttcctggaggaggtccacaagcactctacggtcatcggcaaggtctggctcaccgtcctgttcattttccgcatgctggtcctcggcaccgctgctgagtcctcctggggagatgagcaggctgatttccggtgtgataccattcagcctggttgccaaaatgtctgctacgaccaagccttccccatctcccacattcgttactgggtactgcagatcatctttgtgtccacaccatctctggtgtacatgggccacgccatgcacactgtgcgcatgcaggaaaagcagaagctgcgggaggctgagaaagctaaagaggccggtggcaccggcacctatgagtacttggcggagaaagccgagctgtcctgctggaaagaggtgaacgggaagattgtcctccagggcaccctactcaacacctatgtctgcaccattctcatccgcaccgctatggaggtggccttcatggtgggccagtacctcctctatgggatcttcctggacaccctgcatgtctgccgcagaagtccctgtccccaccccgtcaactgttatgtctcgaggcccacagagaagaacgtcttcattgtctttatgatggctgtggctggactgtctctgtttctcagcctggctgaactctaccacctgggctggaagaagatccgacagcgcctggccaagtcacggcagggtgacaagcaccagcttcttggcccctccaccagcctggtccagggcctcactcctcctcctgacttcaaccagtgcctaaagaacagcccagatgagaaattcttcagtgacttcagtaataacatgggctcccggaagaatccagaccctctggccactgaggaagtgccaaaccaggagcagatcccggaggaaggtttcatccacacacagtatggccagaagcccgagcagcccagtggcgcctctgcaggccaccgctttcctcagggctaccacagtgacaagcgccgccttagtaaggccagcagcaaagcaaggtcagatgacctgtcagtgtgaccctcctcttagggaggaccagtcccagaaggaagccaaggagggtgaggcaggacagaagcggtctctctgactgtataccttcctcagcaccttctctcccgggtctggatggtgttgctcattaatcctccaaatttcagttctgagccgtattctcaaagattgggctactcctcaaatccccaaccccacatcctctaccagtattcgcagtgaagactttcaagtgatttagtgatatggtgggagcaggaatgggaaccttggcaaaatctggtctgggtaggacagacatgaagattcgacattagcaacagataaaccctcaccccaaatcttgtcttcttcggtactaggcccatcctttttattttttaaaggaagaatccaaggttgagagtattcatcaaataatctgcattgtattgttcctttgaatctgtcgtttccatgtgccatacctcagagtgctggtgaggtaactgtgggttgcccttggctgcatctccctcctcccagtcttaaaggggtgtccttggtcctcggccagcatcagctttacaagtgccttggtatgtgcctttggaaaacactgcatgttgatgatgctgcagccttactgccaggctagacacccagctcagaagggtgccaagacctctagaagtcactgtgcacataagcattgctggaattgccaccagctgtcatcctgcagtcctttacagttcaacctagtgatagaaaccgtcctggacagctcacccagtgttcctctaaaatcttggttaacaggaatgtccaaagtcaccatcctctcttggaccctggccagattaccagccaccaagttcagtggaatttccccaggatttaatgaaacaaagagagcattgtgcttctcaggttccttggggggtgttgggggggattcttctgtggagatgaaaagagaggagggggaggacactggaaaactattttcccttctgcatatgccttccactgcctcccagcttggactgctgagaggtgtggtgatagatagcaacggaggcccaagatctctctcttagaggcatcaaggggacctggaagccgagatggagctccggttggttttgacacggcccttatttagtgcagatgctcctgtgtttccttgggacccttaggtacatcagggagggactgtagaaaattcctgccttcctcagggtctatcctgggctatctactgagaggatccacagtcggtgtctctccttatgcagatggaaagatgctcagcgtcagatatcaagacttacaaacacaatgctctgtgtgtgtgtgtgtgtgtgcatgtgtgtgtatgagtgtgtgcatactcaaccatctatgtgtgtatatgtgtgtgtgtgcatgctcaaccatctgtgtgtgtgtgtgtgtgtgtgtgtgtgtgtgtgtgtgtgtgtatacccgtgtatgcatgcagatagaatggtaaagaagagccctgaagaactgtaaggaaacatgtagaaaacttgggtttttctgcctccttttctgttgcccgacaggacagctgagcttgcttcctaatcagcctaaaggtcaaacctgggaagtcagtacaggagggtgaaggttcagaggtcaacccctgcccatgtgaccatctctgggtccctctgctggtatttggatggctgaagatacttgggaaaggctgactggctgtcccagccccagtgtatctcattcattcctgacaccgacgctatgattctctgcttttctagttatgggatgtgtgtttgtcttctgaaatggggccttttgagttagaaaatctgagaccagtcttcgatggtgaggtttttcagaagagaaagagaaagtaatatgtgtgactggttttaaataaaatacgtctctacatgttaaaaaaaaaaaaaaaaaa

SEQ ID NO: 972 - DNA, 1131 bp, Rattus norvegicus
  Genbank Accession No. NM_019286
atgagcacagctggaaaagtaatcaaatgcaaagcggccgtgctatgggagcctcacaagcccttcaccatcgaggacatagaagtcgcaccccccaaggcccatgaagttcgcattaagatggtggccaccggagtctgccgctcagacgatcacgcggttagtggatccctgttcacgcctcttcctgcagttctaggccacgagggagctggcattgttgagagcattggagaaggggtgacttgtgtgaaaccaggtgataaagtcatcccgctgttctctccccagtgtggaaaatgcaggatctgcaagcacccggaaagcaacctctgttgccaaactaagaatctgacacagcctaagggagctttgctggacggcaccagcaggttctcctgcaggggaaagcccattcaccacttcatcagcaccagcaccttctcccagtacactgtggtagatgacatagcggtggccaaaatcgatgcggctgcaccgctggacaaagtctgcctcatcggctgtggcttctcgactggctatggctctgccgtccaagtcgccaaggtgaccccaggctccacctgtgccgtgtttggcctgggaggtgttggtctgtctgtcgtcattggctgtaaaacagcaggagcagccaagatcattgccgtggacatcaacaaagacaagtttgcgaaggccaaagagttaggtgccactgactgtatcaaccctcaagactacaccaaacccatccaggaagttctccaggagatgactgatggaggggtggacttttcatttgaagtcattggccgtcttgataccatgacttctgccctgttaagctgccattcagcatgcggtgtaagcgtcattgtcggggtgcctcccagtgcccaaagcctctccgttaaccccatgtcgctgctgctgggacgcacctggaaaggagcaatattcggcgggtttaagagtaaagatgccgtccccaaacttgtcgctgacttcatggctaagaagtttccgttggagccgctgattactcatgttttaccttttgaaaagataaatgaagcatttgacctgctccgtgctggaaagagtatccgtaccgtcctgacgttctga

SEQ ID NO: 973 - DNA, 1430 bp, Rattus norvegicus
  Genbank Accession No. NM_019289
atggcttaccacagcttcctggtggaacccatcagctgccatgcctggaacaaggaccgtactcagatcgccatctgccccaacaaccacgaggtgcacatctacgagaagagcggtgccaagtggaacaaggtgcacgagctcaaggagcacaacgggcaggtgacaggcatcgactgggcccccgagagtaaccgcattgtgacctgcggcacagaccgcaatgcctatgtgtggacgctgaagggccgcacgtggaagcccacgctggtcatccttcggattaatcgagctgcccgctgcgtgcgctgggcccccaatgagaacaagttcgccgtgggcagtggctcccgtgtcatttccatctgttattttgagcaggagaatgactggtgggtgtgcaaacacatcaaaaagcccatccgctccactgtccttagcctggactggcaccccaacaacgtgctcctggctgcaggctcctgtgacttcaagtgcaggatcttctctgcctatatcaaggaggtggaggaacggccagcccctacaccgtggggctccaagatgccctttggggagctgatgtttgaatcgagcagcagctgtggctgggtgcatggtgtctgcttctcggccggtgggagccgagttgcttgggtcagccatgacagcactgtgtgcctggtagatgctgagaagaagatggccgtggcaaccctggcctctgagacattaccgctcctggccatcaccttcatcacagaaaatagtctcgtggcagcgggccacgactgcttcccggtgctgtttacctatgacaacgctgcggggacattgagctttggtggccggctggatgtgcccaagcagaactcccagcgtggcctgacagcccgagagcgcttccagaacctcgacaagaaggccagctctgaagggggtgcagccacaggggctggcctggattcactgcacaagaacagcgtcagtcaaatctcggtgctcagcgggggcaaggccaagtgctcgcagttctgcaccacaggcatggacggtggcatgagcatctgggatgtgaagagcttggagtcagccttgaaggacctgaagatcagatgagctgtgaggagtgctgtcctcatcccacatgctggggaggagggaaaggggttggggaggctaagggctgctttgctgaatgcttctagggtgtagtacaggtctgcaaaggggatgctctctctccaaagaggggaagaggaaggtggggaactttcctgcctatttaatgaaaatgtgccttttaaagagatgctttcattcattgcaaaccaaaaacaagacaaaaaacccaaagcacaatgctggtcataaactgcttcaaaatgtgggctaataaacataccaaatgtgaaaaaaaaaaaaaaaaa

SEQ ID NO: 974 - DNA, 1259 bp, Rattus norvegicus
  Genbank Accession No. NM_019290
ggcacgagggcgagggtgcagccccggagcggcggcggggcaaaatgaaaaacgaaattgctgctgttgtcttctttttcacaaggctggttcgaaagcatgataagttgaaaaaagaagcagttgagaggtttgctgagaaattgactcaaatacttcaagagaaatacaaaaatcactggtatccagaaaaaccctcaaaaggacaagcctacagatgcattcgtgtcaataagtttcagagagttgatcccgacgtcctgaaagcctgtgaggacagctgcatcctgtacagtgacctgggcttgccaaaggagcttacactctgggtggatccgtgtgaggtgtgctgccggtatggaaagaaaaacaatgcattcattgttgccagctttgaaaatgaggatgagaacaaggatgagatctccaagaaagttagcagggctcttgataaggtgacctctgattatcattcagggtcctcctcctcagatgaagacacaagcaaggaagtagaagtgaaaccgagtgcagtggctacaacgccaagccccgtgtaccagatttcagaactgatattcccacctcttccaatgtggcaccctttgcccagaaaaaagccaggaatgtaccgagggggtggccatcagagtcactaccctcctcctgttccatttgcttatccaagtccaggaaggaagaataaagcgttccgcccaattccagtgacatgggtacctcctcctggaatgcattgtgatcggaatcactggattaatcctcacatgttagcacctcactagttcatttggattgggcggatgtcattttgatagaaaggaagaaataccttcttagatacttaagagtttcacaacttgtagtgaagtcagatggacaaaaccatcaggcttatttttatagaaaagctattgagataatctttcttaaagtatatatatatatgcactttagatatattgatatagtttgagaaactttattaaagttagtcaagtgcctgagtttttaatattggacttgagtatttatatattgtgcattgactctgttggatacaaaacactgtaggagggcgatatgttttagcacctttgagcatttactttatggagaatatgtaagttatttatacagaaggacatttattttatgtcacatagaagaattgtgtgaaatcatgtagttgcaaataaaaagtagtttgaggcgtgaaaaaaaaaaaaaaaaaaaaaaaa

SEQ ID NO: 975 - DNA, 1184 bp, Rattus norvegicus
  Genbank Accession No. NM_019296
ctcggcctctaagctcccggagtcgctgcgtccgcgcagtccggaactcgtgtggccaccgcgggaacagagagggtccgttgtaacctgttgagtaactatggaggactatatcaaaatagagaaaatcggagaagggacttatggtgtggtatataaaggtagacacaggactactggccagatcgtggccatgaagaaaatcagacttgaaagcgaggaagaaggagtgcccagtacggcaatccgggaaatctctctgttaaaagaacttcgacatccaaatatagtcagcctgcaggatgtactcatgcaggactccaggctgtatctcatcttcgagttcctgtccatggatctcaagaagtacctggactctatccctcctggccagttcatggattcttcgctcgttaagagttacttgtaccaaatcctccaggggattgtgttttgtcactcccgacgagttcttcacagagacttgaaacctcaaaatctattgattgatgacaaaggaacaatcaaactggcagatttcggccttgccagagcgtttggaataccgataagagtgtacacacacgaggtagtgacgctgtggtaccggtcgccagaggtgttgctgggctcggctcgctactccaccccggttgacatctggagcatagggaccatatttgcagagctggcgaccaagaagccgcttttccacggcgactcagagattgaccagctcttcaggatcttcagagctctgggcacccctaacaacgaagtgtggccagaagtagagtccctgcaggactacaagaacactttccccaagtggaagccggggagcctcgcgtcccacgtcaagaacctggatgaaaacggcttggacttgctctcgaaaatgctggtctatgatccagccaaacgaatctctggaaaaatggcccttaagcacccatactttgacgacttggacaatcagatcaagaagatgtaaccctctggaagtcccgccctgctgtggcagggaagatcgtggcgtttactgttggctcttcctgtcttgtatagttttcttttctttgtctgtaaaccatcatctggacttttcctattttcctacgtataacttaattaacatgtaaatattattccatatgaatttaaatataattctgtatatgtgt

SEQ ID NO: 976 - DNA, 1944 bp, Rattus norvegicus
  Genbank Accession No. NM_019318
gggcagggcggggggtgtgtgcacgctcgagctttcgggccacagccaccgccgcgcgagctagaagcgccctagcccggcaagctggctcacccgctggccgcccagcacagcccgctggcccctctcctgcagcccatctggcggagggcggcggcggtggcggaggcaggaggatggcttcagaactggcaatgaacaattccgacctgcccaccagtcccctggccatggaatatgttaatgacttcgatctgatgaagtttgaagtgaaaaaggaaccggtggagaccgaccgcatcatcagccagtgcggccgtctcatcgccgggggctcgctgtcctccacccccatgagcacgccctgcagctcggtgcccccgtcccccagcttctcggcgcccagcccggcctcgggcagcgaacagaaggcgcacctggaagactactactggatgaccggctacccgcagcagctcaacccggaggcgctgggcttcagcccggaggacgcagtcgaggcgctcatcagcaatagccaccagctccagggtggcttcgatggctatgcgcggggcgcgcagcagctggccgcggcagcgggggccggcgccggcgcctccctgggcggcagcggcgaggagatgggccccgccgccgccgtggtgtccgccgtgatcgccgcggccgccgcgcagagcggcggggcacctcactaccatcaccaccaccaccacgccacggggcaccaccaccacccgacggccggcgccccgggagccgcgggtagcgcgtccgcctctgcgagcggcgcgggtggcgcgggcggcggtggcccggccagcgccgggggcggcggcggcggcggcggcgggggcacggcgggggcggggggcgccctgcacccgcaccatgccgcgggaggcctgcacttcgacgaccgcttctcggacgagcagttggtgaccatgtcggtgcgtgagctgaaccggcagctgcgcggggtcagcaaggaggaggtgatccgactgaagcagaagaggcggaccctgaaaaaccgcggctatgcccagtcctgccgcttcaagagggtgcagcagagacacgtcctggagtcggagaagaaccagctgctgcagcaggtcgaccacctcaagcaggagatctccaggctggtgcgcgaaagggacgcctacaaggagaaatacgagaagttggtgagcagcgggttccgagaaaactgctcgagcagcgacaacccttcctctcccgaatttttcatgtgagtgtgacacgcgatcccagctagccaccttgttaaatgctccgtgggggtccggctcctgagtgggcttgccagtttgcagggccacgctcgccaccacctcgccccctcccctggcgagtttgctccccttggccctgcacgcacacacacacacacacacacacacacacacacacacacacacacacacacacacacatacacacacacacacacacagcaagcttgtggtggtggtggtggctcttttgagttggggagggaaagggtatctggctcatggattgccaacctgaattcccctgtaacttgctagcttggttgttttggtcttttttattattattattactctttttacaccgcctaccccacacataccctggacttgcacaagggtcaaagatctgagcaggatacttcatgtaggacataactcacctttgaacccggccatcaagcgcctgtatattttttttcttcttcttctttagttcatgagctggtgttcattctctgtgtgtgtgtttttttattttgtttggattttcttttttcttctttgtttttgtttattattactaatttttttggagcttgctgtgtttcccagcctctgccctccctccctctgcaccatgttcttgagataaaag

SEQ ID NO: 977 - DNA, 4361 bp, Rattus norvegicus
  Genbank Accession No. NM_019345
cccggagccataatggcagagctacccgtgacagagatgccaggcgatgctctgtgcagtgggcgcttcaccatcagcacgctgctggggggtgacgagcccccaccagctgcctgtgacaatagccagcccagccatttgacccatggcagcaccttgtacctacgcacctttggttacaacactatagatgtggtacctgcctacgaacactacgctaacaggcctctgcccggcgagccccggaaggtgcggcccaccctggctgacctgcactcgttcctcaagcaggaaggtagccacctgcatgccctggcctttgatggacggccaggccatgagctgactgatggacttgtggaagacgagacaggcgccaacagcgagaagagccctggagaacctgtgcgtttcggctgggtcaagggagtgatgatccgatgcatgctcaacatatggggtgtgatcctctatctgcggctgccctggattacggcgcaggcgggcattgtcctgacctggctcatcatcctgctgtcagtcatggtgacatctatcaccggcctctctatctcggccatctccaccaatggcaaggtcaagtcgggtggtacctatttcctaatttctcggagtctgggacctgagctggggggctccattggcctcatcttcgcctttgccaatgccgtgggtgtggccatgcacactgtgggctttgcagagaccgtacgagacctacttcaggagaacggcacacccattgtagaccccatcaatgacatccgcatcatcggtgtggtcacggtcactgtgctgctggccatctcgctggctgggatggagtgggagtccaaggcccaggtgctgttctttcttgtcatcatggtctcttttgccaactacctggtgggcacgctgatcccagcatctaaggacaaagcctccaaaggtttctacagctaccatggggacatttttgttcagaacctggtacccgactggagaggcatcgatggtagcttcttcgggatgttctccatcttcttcccttcagccacaggcattctggcaggggccaacatctctggggacctcaaggaccctgctgtcgctattcccaagggaacactcatggccattttctggaccaccatttcctaccttgccatctcggccaccatcgggtcctgtgtggtgagggatgcctctggggacgtgaacgacaccataactcctggcccaggcctctgtgaagggctagcctgcgttatggctggaacttcacggaatgctccccagcagcacagctgccgctatggcctcatcaactactaccagaccatgagcatggtgtctgccttcgcacccctgatcacagccggcatctttggggccaccctgtcctcggccttggcctgtcttgtctcagctgccaaggtcttccagtgcctgtgcgaagaccagctgtaccctctgattggcttctttggcaagggctatgggaagaacaaggaacctgtgcgtggctacttgctggcctacgccatcgcggtggccttcatcatcattgctgagctcaacaccatcgctcccatcatttctaacttcttcctctgctcctacgccctcatcaacttcagctgcttccatgcctccatcaccaactcacctggatggagaccctccttccgatactacagcaagtgggcggcgctgtttggggcagtgatctccgtggtcatcatgttcctgcttacctggtgggcagctctcattgccattggagtcgttctcttcctcctgctctatgtgatctacaagaagccagaggtaaactggggctcctcagtgcaggctggctcctacaacctggccctgagctactccgtgggcctcaatgaggtggaagaccacatcaagaactatcgcccccagtgcctggtgcttacaggaccccccaacttccgcccagctcttgtggactttgtgagcacgtttacccagaacctaagcctgatgatctgtggccacgtgctcattgcacccggcaaacagagagtgccggagctccggctcatcgccagcggacacaccaagtggctgaacaagaggaagatcaaggccttctactctgacgtcatagctgaggacttgcgcagtggcgtccagatcctcatgcaggcctcgggtctgggaagaatgaaacctaacattctggtggttggcttcaagaagaactggcagtctgcccacccagccacactggaggactacattggcatcctgcacgatgcctttgacttcaactacggggtgtgcatcatgaggatgcgtgaggggctcaatgtctctgaggcgctgcagacgcacacagccccagaggcactggtacaggaggagcagaccagcaccatcttccagtcggagcaaggcaagaagaccattgacatctactggctgtttgacgatggaggcctcaccctcctcatcccttatctcctgcaccgcaagaagagatggggcaaatgcaagatccgcgtgttcgttgggggccagatcaacaggatggatgaagagagaaaggcgatcatttctctgttgagcaagttcagactgggattccatgaagtccacgtccttcctgacatcaaccagaagccccaggtggagcacaccaagcggtttgaggacatgattgcccccttccgtctcaatgacggcttcaaggacgaggccactgttgccgagatgaggagggactatccctggaagatctcagacgaggagattaataagaacagaattaagtcccttcggcaggtgaggctgaatgagattctcctggattactcccgggatgctgctctgatcatccttaccttgcccattggaaggaaggggaagtgccccagttcactgtacatggcctggctggagaccctgtcccaggacctcagtcctcccgttctcctcatccgaggtaaccaggagaacgtgctcaccttttactgccagtgatgtccagtgtggcagttcctgccgagagctgagcgcgtgggatagagtcggaactcacgctctccagctggagaagaggcttcaattcctgctgtgtcatcacatctaccggctgtgtttccaagctggctgcaccccatcagacacaccttctagaccttgaagttgcacggaaaagcttctggaagagtcttatctctttttaaaaagcttttcttttttttttttttttgtcttgatgaccgaaatattagtcattgattcagtctttgatttgtatacaaatcgagtcccagtattgggtgtgcaacttgacaatctctctcgggaccttccctgtgaccacccccaaagctgtctcatcccccccagacaggagagcaggagcccatcctgaggacccatgtggagttctgatgaccacaggaccctttgagctacacagcaacacacatttctcctcctgttccctttcagtgatggatcctgggtgctcctactagttatttagaccagggtcctctgggttctttgattacaaattctatggtttcctcagagactcagaacacacagaacaatggtagggaagcatcacaaactggtcctcactctcgagggtgcttctctcccctctctcccctctccccccccctccctctctctctcctttttccttctgacagagtcttatgtggtccaggctggccttgaacttgttctgtagtcaagaatagcttcaaacatctgatcccctgcctccattacagagcacagggattccaggcacattcacataggcatgtttcacgaggtgatagggaccacacctacggttgatgggtgccggcaatcacctgctgactatgctacccccgcccagtctctagtgtgctcctttgaagttgattgcaaccttctaaatgatcttcaaacccactcgtgtgcagtgacccgtgctttgaaaaacaggtttaatttctggaggttgtgtgtagggtctgttgctggttggtttctttgttgctcgggaattttgttttgtcaacttgacaggagctagggccatctaagcagaaggaacctcaattgacaaatgcctcctgctgattggcggcctgtaatgattgacggggtggggccagcccactgtgttgccgtaccaccatgagcaggtggtcctggggtgtataagaaagcaggctgagcaagctatgggagcaagccagtgaggagtgtctcttcatggcttctgcttcagttcctgcctggagttccttccctgacttctcttcattataaaccgtaagccatgagatgaaataaacccttttctcccc

SEQ ID NO: 978 - DNA, 3974 bp, Rattus norvegicus
  Genbank Accession No. NM_019347
aaaaagaggaaagacagagccggcctagacagcagacatcaggacacccttctaggccagctctgttttctgccttaatgctcaaggaagactgcaagatcatctgaggtgggctctgtaacagcgtcagctccacaaagtcatcgctgcaaagttcaggagatgggagatctttcctgttttcttactgagtgtttccgggtgtgagtgcatcgcattgacatcttcctacctctgtggacaaacaaggacaaggctcgaatcccctcagtctacttcatcagccggacctgcatgactggctattttgaccacttgaagtcatctaaatagaagttctcaagaccaccaagaccaaggacacttcacatgacagatgagcgaccatcccctgaaggagatgtctgacaacaaccgcagcccccccttgccagagcctctttccagcagatacaagttgtatgagtcagagctaagcagccctacctggccttcaagctcccaggatacacacccagcccttcccctgctggaaatgcctgaagaaaaggatctccgatcatcggatgaagacagccacatagtgaagattgaaaagcccaacgagcggagtaaacggagagaaagcgagttgccccgcagggcttctgcaggccggggagcgttcagcctcttccaagctgtgagctacctcactggtgacatgaaggaatgcaagaactggctgaaagataagcccctggtccttcagttcctagactgggtcctgcggggagcagctcaggtgatgtttgtcaacaacccccttagtgggctcatcatcttcatagggctcctgatccagaatccctggtggacgattgctggggcactggggacagtggtctcaaccttggctgcccttgccttgagccaggacaggtcagccatcgcctctggactccatgggtacaacgggatgctggtgggactcctggtggctgtcttctcagagaagttagactactactggtggcttctgtttcctgtgaccttcgcatccatggcctgcccagttatttctagtgccttgagcaccgtcttcgccaagtgggacctgccagtcttcacactgcccttcaacatcgccttaacactgtacctggcagctacgggccactacaaccttttcttccccacgacgcttgtgaagcctgcgtcttcagcgcccaacatcacctggtcagagattgagatgcctttgctgttacaaaccatccccgttggggtgggccaggtctacggctgtgacaacccctggacaggcggcgtgatcctggtggctctgtttatctcctctcccctcatctgtttgcacgcagccataggatccattgtggggctgctggcagcactgacggtggccactcccttcgagacgatctacacgggcctttggagctacaactgtgtcctctcctgtgtcgccattggaggcatgttctacgtactcacctggcagacacacctgttggcacttgtctgtgccctgttctgtgcgtacacgggagcggccctctccaatatgatggcagtggttggtgtgccaccgggcacctgggccttctgtctctccaccctcaccttccttctcctcacaagcaacaaccctggcatccacaagctcccactcagcaaagtcacctacccagaggccaaccgcatctacttcctgacagcgaaacgcagtgacgagcagaagccccccaatggtggcggtggagaacagtcacacggaggaggccagcggaaggcagaggagggctccgagaccgtgttccccaggcgtaagagcgtgttccatatcgagtggtcatccatccggaggaggagcaaagtgtttggaaaaagtgaacaccaagagagacaaaccaaagagccactcccctacctgtatcggaagcccacagtggaactcttggacctgaacaccatggaggagagctctgagataaaggtagaaaccaacacaaccaggactacctggatccagagctccatgatcgctggggggaagagagtcagcaaagccctcagctacatcacaggagagatgaaggagtgcggcgagggacttaaagacaaatctccagtgttccagtttcttgactgggtgctccgaggcacgtctcaggtgatgtttgtgaacaaccctctcagtggcatcctcatcgttcttggcctcttcgtgcagaatccctggtgggccatctccggttgcttgggcaccatcatgtccaccttgactgccctcatcctgagccaggacaagtcggccattgcagcaggactccatggctacaatggggtgcttgtggggctcctgatggccgtgttctcagacaagggcaattactactggtggctgctgctcccggtcatcgtcatgtccatgacttgccccatcctctccagtgctctgagcaccgtcttcagcaaatgggacctcccagtcttcacactgcccttcaacatcgccgtgaccctgtacctggcagccacgggccactacaatctcttcttccccacgaagctgctgcagcctgcagttaccacacccaacatcacctggtcagatgtccaagtgcctttgcttctgagagccatccccgttggaatcggccaagtgtatggctgtgacaatccctggactggaggcatcttcctcgttgctctgttcgtctcttcacctctcatctgcttgcacgctgccatcggatccacgatagggatgttagcagcactcagcattgccacaccatttgactccatctactttggcctgtgtggcttcaatagcactctggcctgtatcgctattggtggcatgttctacgtcatcacctggcagacgcacctgctcgccattgcctgtgccctgtttgcagcctacctgggtgctgccctggccaacatgctgtctgtgtttggattaccaccctgcacctggcccttctgcctctcagcgctcaccttcctcctcctcacaaccaacaaccctggcatctacaagctcccgctcagcaaagtcacctacccagaggccaaccgcatctacttcctgtcccaggagaaaaacagaagggcatcgatgataacaaagtaccaggcctacgacgtctcctaagctgccctttctaagctcgtctggtaaatgcagcctccagaacccaccctgcaccccaggctaaatctaagtcactcaaccacccttcttcctaatatgcgagtggctgctatttggagccctcaatgagatgtgcagcgctcatcaaagccacgctagtttaaactaaatacccaccgatggctctttgggaactctctgtggggggaacttgctagtcacctctttcagttatttagtggcgcaaatcatgattccaggaaatgttcattagcctgccatgcaagagggctgggttcactaatgagttccaactgtctcaggccagtcttctccctaccccatccccacccctatccacacccaccccacccctcatctcagcctgggtgttttgttgccaaggatttctttaccatgacaaggaaggactccaaagtccttccacctcagaagcatttattcttttccatatcctgtaaactaaccaactcagcatggccagcaagtaattattctgacttgagttacttatggaatggctctcagaggagagaggaaaatgttagtgccctgtggaagtttattcttagatatctgggagatgctctaaggcttgggaccggacacctgaattcattgaaaatgccaatgtatcttctttgcaccatagaaatatttccagaaacatcatctggtaaggagtgaccttttccaacatccaatcatagtgtaagcaaacgtctttgcttgtgtaatattcaaaatcagtagtcattaaacttgaaatttgcaaaaaaaaaaaaaa

SEQ ID NO: 979 - DNA, 1377 bp, Rattus norvegicus
  Genbank Accession No. NM_019356
gttcgggattcacacatacacttcagaatgccgggtctaagttgtagattttatcaacacaaatttcctgaggtcgaagatgtagtgatggtgaatgtaagatccattgctgaaatgggggcctatgtcagcttgttggaatataataacattgaaggcatgattcttcttagtgaattatccagacgacgtatccgttctataaacaaactgatccgaattggcagaaatgaatgtgtagttgtcattagagtggataaagaaaaaggatatatagatttgtcaaaaagaagagtttctccagaggaagcaatcaaatgtgaagacaaattcacaaaatccaaaactgtttatagcattcttcgccatgttgctgaggtattagagtataccaaggatgagcagctggaaagcctattccagaggactgcctgggtctttgatgacaagtacaagagacctggatatggtgcctatgatgcctttaagcatgcagtctcagacccatctatcttggatagtttagatttgaatgaagatgaaagagaagtactcattaacaatatcaataggcgtttgaccccacaagctgtcaagattcgagcagatattgaggtagcttgctatggttacgaaggcattgatgctgtaaaagaagccctgagagcaggtttgaattgttctacagaaaccatgcccatcaagattaatctaatagctccacccaggtatgtgatgacaacaacgaccctagagaggacagaaggactctctgttctcaatcaggctatggcagtcatcaaagaaaagattgaggagaagaggggagtgttcaatgttcagatggagcccaaagtggttacagatacagatgagactgaacttgcaaggcagctggaacggcttgagagagaaaatgcagaagtggatggagatgatgatgcagaagaaatggaagccaaagctgaagattaaccttttggaaaacagtccaatttaaggagtacgaagcagccctttctggctgtaaaccctagacttgaaagttttccagtattgaaaacttcaaagctgaatatttttatttccaagtatttaagtattcgacaagccagaatctaaatgccctccttcatgtcagctgttttcacatagtggctctaacacctcaagcgtttttaagggagtggcttgatttgaccagagacaaatgttaaaccgcagtcctaaaattgggcttgcggttttcatttctgatgtctctggattggcacccttatggtttagagaattaccaggggctccagacaccaacaatcccaacctttctatataaaatgtactcaagcaaacatcaaataaatttctgggatattt

SEQ ID NO: 980 - DNA, 1854 bp, Rattus norvegicus
  Genbank Accession No. NM_019358
ggagacataaattgccgactgtgctgagaagttgccagttgccaagtttgctgtgcttgctccctccgctcgccttgaaagcccgggcactctctgtcgctgggactcttgctcaccgcttgccagcctcctcagagctcttctcggctgggcctgtggcttcgaagtttttttgttttttcatcttttcacaacccacaaaaaccactagctgctgaggctccaacgagatcaagatgtggaccgcgccagtgttgctctgggttttggggagcgtttggttctgggactcagcgcagggaggggccatcggtgcgctagaagatgatcttgtgaccccgggtccaggagatgacatggtgaacccaggtctagaagacagaatagaaaccacggacactacaggagaactggataagtcaactgccaaggcgcctctggtaccaacacagcctcccattgaggaactgccgacctcaggaacctccgaccacgatcacaaagaacatgagagtacgaccactgtcaaagcggtgaccagccactccacggacaagaaaacaactcaccccaatagagataacgcaggcggtgaaacgcagaccacagataagaaagatggcttggctgtagtgaccctggtcggaatcataattggcgtcttgttagccattggcttcattggagggatcatcattgtggttatgaggaagatttctggaaggttctcgccctaaagagccaaacagaactggttgttctcccaacacatctgaaaataagagagcttccaccttgccctgttccccatccctcttcctgtggaggaagatgacccatggaatgcccacccacccctctcacagccatggtgacccctccacttgccagcagtaccaaaggaaagatacgggacaagccactggcccctcgaaccatctgcgtttggaaatcaaattttttaatataaatgttatgattgaggaccacatgcatagaaaaatggtgcaaaaaccgagacagtatcatcagctttatcaactgtaaccatgggttggttcttccgggccagtcccagtctgttaagaggcaaaagaatttggaaaatgttacctcacagaggcacgggtctttttgcagttgccaacctgcaaatgcagttgatgcatacatattccagcctagtggggtctgaatcagtgcattgaaagtataaacccaaaatcaggcgtgataggcagcccctcagggagcttcattataccttttcagaagcatccactgccttcagttcccggaagataccttgctttttacaagcctccaaaccctctctaagcctcagatgactcaatgacccagaggtctgtctactccactccccctggtgatggaaagcccaagttgaggaaccatgtcctcacctccctaggcctcaagccttcagatcaaccgcttctttctggacgatggagacctcatcccagatgctcagaaagtttgttggatgtcacaaaatgccagagcctcagccgctgtcgaaccaagaacgaaactcagtccttaagtggaagtgactcctgtgcctgctttaggctaggaaatgagaccaaccagtttctagcacctgccttctgcttcccaggaaagacggagaaaaaaataatcttgtatgttcttaactgcttctaggtggtggatggaaaggtttgatgttaatttccggtcttcgtgacataccacatcttcccatgaggactcggtgttgctggcacaagagctgtagtgtcttggttacctgtgttggtactcaatacagtgtagacatcttttcaaataaaatatgattgtgtg

SEQ ID NO: 981 - DNA, 747 bp, Rattus norvegicus
  Genbank Accession No. NM_019374
atggcgtggtccaggctgatgctggcagcttgcctccttgtgatcccctctgaggttgcagcggactgcctgtccttgtgttccctgtgtgcagtgaggacgcaggatgggccccatcccatcaaccccctgatttgctccctggagtgccaggacctggtgccgccctcggaggagtgggagacatgccggggcttttggtcttttctcaccctgactgcctctgggctccatggcaaggatgacttggagaatgaggttgctttggaagaaggctacacggcactgaccaagctcttggagcccctcctgaaggagctggagaaaggccaactccttaccagcgtctcagaggaaaagctcaggggtctctccagcaggtttggcaacggaagagaatctgagctactgggcactgacctgatgaatgatgaagccgcacaggctggcacgctccatttcaacgaggaggacttgagaaaacaggccaaacgctatggcggctttttgcgcaaataccccaagaggagctccgagatgactggggacgaggacaggggccaggatggggatcaggtagggcatgaggacctgtacaaacgctatgggggcttcctgcggcgcattcgccccaagcttaagtgggacaaccagaaacgctatggtggttttctgcggcgtcagttcaaggtggtgactcggtcccaggagaaccccaatacctattccgaagatttagatgtttga

SEQ ID NO: 982 - DNA, 3842 bp, Rattus norvegicus
  Genbank Accession No. NM_019379
gggagagccggctcgggggctaggcccttcgggggcggggggctgtcgtgttttctttggcggaggggctggtgaagccggcggctgagcgacgagatgaatttcctccgcggggtgatggggggtcagagtgccggaccccagcacacagaagctgagacgattcagaagctctgtgaccgcgtagcttcatctactttactggacgaccgaagaaatgctgtccgtgcccttaagtcactgtctaagaaataccgcttggaagtgggaatccaagccatggagcatcttatccacgtcttacagacagatcgttcggattctgaaataatagcgtatgctttggacacactctataatataatatccaatgatgaagaggaagaagtagaagaaaattctacaagacagagtgaggatttgggaagccaatttacagaaattttcattaagcagccagaaaatgtcactctcctgttatctttgttggaggagtttgatttccacgtccgatggcctggtgtgagacttctgacttctcttttaaaacagctagggcctccagtgcagcaaatcatcctagtcagccccatgggtgtttcaaaattaatggacttgctggcagattccagggaaattatacgtaatgatggcgtcttactactgcaggcattaacaaggagcaacggagcgatccagaaaattgttgcttttgaaaatgctttcgagagactactggacattattacagaggaggggaacagcgatggaggtatagtagtggaagattgtttgattttgctccaaaatttgttaaaaaacaacaattccaatcaaaatttttttaaagaaggctcttatattcaacgtatgaaagcttggtttgaagttggagatgaaaatcctggttggtcagcacagaaagtgaccaatcttcatttaatgctccagcttgtgcgggtactggtgtctcccaccaaccctcccggtgctaccagtagctgccagaaggccatgttccagtgtgggttactacaacagctttgcactatcctgatggctaccggaattcctgctgatatcctgactgagaccataaatactgtatcagaagttattcgaggctgccaagtaaatcaagactactttgcttctgtgaatgcgccttcaaatcccccacgaccggcaatcgttgtgctgctcatgtccatggtcaacgagaggcagccatttgtactgcgctgcgccgtgctctactgtttccagtgcttcctctataaaaacgagaaaggacaaggagagattgtggccactctgctaccttccactattgacgcaacaggtaactcggtctcagctggccagctgctctgcggaggtttgttttccacagactccctctcaaactggtgtgctgccgtggccctcgcccatgcactgcaagggaacgccacccagaaggagcagctgctcagggttcagctggccaccagcatcggcaaccccccagtgtcgctcttgcagcagtgcaccaacattctgtcccagggaagcaagatacagacaagagtcgggttgttgatgttgctttgtacctggttaagcaactgtccgattgctgtaacacactttcttcacaactcagccaatgttccatttcttacaggacagattgcagaaaatctcggagaagaagagcagttggtccaaggcttatgtgcccttcttttgggcatttcaatttatttcaacgacaactcactagaaaactacacgaaagagaaactaaagcaactaatagagaagaggattggcaaagagaattacatagagaaacttggatttattagcaagcatgagttatatcccagagcatctcagaaaccccagccaaactttccgagtccagaatacatgatatttgatcatgagtttacaaaactggtgaaagaacttgaaggtgttattaccaaggctatttataagtccagcgaagaagataagaaagaggaagaggtaaagaaaaccttagaacagcatgataatattgtgactcactataagaatgtgatccgtgagcaagacctacaactggaggaactaaaacagcaagtgtccacactgaaatgtcagaacgagcagctgcaaacagcagtcacccagcaggcttctcagattcagcagcacaaggatcagtacaacctcctcaaagttcagctcgggaaagacaatcaccatcaaggttctcacagtgacggggctcaggtaaatggcattcagccagaggaaatcagtcggctgagggaagagatagaagaattaagaagtcatcaggtgctcttacagagccagctagctgaaaaggacactgtgattgaaaatttgagatcttcacaagtgtctggcatgagtgaacaggctttagcaacgtgttcacccagagatgccgagcaagttgcagagttaaaacaggaattgtcagcattaaagtcccagttatgttcacagtctctggagatcactagactccagacagagaaccgtgagctgcaacagagagcagagaccttggcaaagtcagttcctgtagaaggagagagtgagcttgtgacagccgcaaaaactacggatgtagagggaaggctgtctgccctgctgcaggagaccaaagagttaaagaatgagattaaagcattgtctgaggagaggacctccattcaaaagcagctggactcctccaacagcaccatcgccatcctacaaacggagaaagacaagctatacttggaagttacggattctaagaaagaacaagatgatcttttggtgctgttggcagatcaagatcagaaaatcctgtcactgaagagtaaactcaaggatcttggtcatccagttgaagaagaagatgaatctggagaccaagaagatgatgatgatgaacttgacgatggtgacagggaccaggatatctagctttaaaccctaggaacaatagagattatgtcattgtgttgaagaagtcttaagacagtgctttggcttgcctccacaaaaaataaagacagaaccaggtggaaagcattcactaataaaattattgatgtatgtttttaatattgccacccatgtgggaaactctgacttcatgtggaagttttatttatgttcttctgaactctcccaaaatttgcagagggcaccaggttccaaaaacacagcatttgaaggcacgtggtggcagtgcagttccttactggttcactggtcggtcgcttgctttcagacagagtctgggccttcagtactaacatttgattaatgtgtattgaacgggaatcactatttctaaatcagcgtttgcattctcggctgattaatccttgtaaagaaaggactgtacttaaagacagggcagccttgaatcaggggtcctgtgtgtcatcacccccttccccactgtgcctccctggtgagcaggatgggacagttcagagtgcttgccgtccagcaggccacctctgcctactgagcggaaagactgtcccggagtgtgaaagcactctgaggagctggaacagtgtattaacgtggctggttttctctctgttaaagctaaagaaggaaacagtatagtcagcagttcatacagctgggattagaattgtttgattatcacaaaacatgttcttagttttacaaaaacccaaactatgatttatgtaatttattggcatttttgctgaataggtgtaagtcagataatagatttttaaaaagcaaatgaagcaatgtgtcaaagtataatgttttcataataaaaatagatattatgttcactt

SEQ ID NO: 983 - DNA, 2786 bp, Rattus norvegicus
  Genbank Accession No. NM_019622
tgccgagggtgacaccatggccctggaacaggcgatgcaggcggcacggcggggcgacctggacgtgctgaggtccctgcacgccgccggcctgctggggccttctctgcgcgacccgctagacgccctgccggtgcaccatgcggcccgctcaggcaagctgcactgtttgcgctacttggtggaggaggttgccctcccagctgtgtcccgcgcgcgcaacggcgccacaccagcccatgatgccgctgccacgggctacctctcttgcctgcagtggctgctcacacagggtggctgcagggtgcaggaaaaagataactctggtgccacggtcctgcacctggctgcccgctttggccacccggacgtggtgaactggctgctgtaccagggcggtgcgaactctgccatcaccacagacacgggcgccctgcctatccactatgctgccgccaaaggagatctcccctccatgaagcttcttgtcgggcactaccctgagggagtgaatgcccaaaccaacaacggtgccacgcccctgtacctggcgtgccaggagggccacctggaagtgacgaagtaccttgtgcaggagtgcagtgcagatccgcacctgcgcgcccaagacggcatgacccccctgcatgccgcggcgcagatgggccacaacccagtcctggtgtggctggtgagctttgcggacgtgagcttcgagcaggaccacgacggcgccacagccatgcactttgcagccagccgcggccacaccaaagtgctcagctggctcctgctgcacggcgcagagatctcccaggacctgtggggcgggaccccgctgcatgatgctgctgagaacggggaactggagtgctgccagatcctcgcggtgaatggtgcggggctggacgtccgcgaccacgatgggtatacggctgcggacctggctgatttcaatggccacacccactgctcccgctacctacgtacggtgcaaaccctgagcttggaacaccgagtcctgtcccgggatccatccatggacctggaggcaaagcagccggactcaggcatgtcttcacccaacaccaccatgtcggtccagccgccgaactttgaccttggctcacccaccagcaccctctccaactatgactcctgctcctccagccattccagcagcaagggtcagcgctctactcgaggtgccagatcctcagacttacagagctacatggacatgctgaacccagagcctcggagcaagcaagggaagccttcatctctaccaccaccgccaccaccaagcttccctccaccaccacccccaggcacacagctgcccccacctccaccaggctacccagctcccaatccccctgtggggctgcatttggataacatttacatgcagaccaagaacaaactccgccacgtggaggtggactccctcaagaaggagccgagctccggcgacggctactcggggctacgcaggcaggattccgggctgctcaggcaggattcggagctgctgctcaggcacaacaccggactgcgcaggcaggactccgaccgcaaacagcgttcattcagtaaacagcccagcacgggggactactaccgccagctgggccgcagcccgggggagccgctggccgcacgcccgggcatggcccacagcgaggaggcggcgctgctccccgggaaccacgtgcacaacggctgctccgcggactccaaagcgtccagggagctgccgccgccaccgccgccgccgcccctgcccgaggccctgagttcgccgccacccgccccacctctgcccatcgagggcgcgggcgcagcctgcggacagcggcgttcctcatcttctactggcagcaccaaatctttcaacatgatgtccccaacgggtgacaactcggagttgctggctgaaataaaagcaggcaagagtctgaaaccaacaccgcagagcaaggggctgacaacagtgttctcaggcagcgggcagccagcctcccagcctgagtcaccacagcctgcggtgtcacctgggccatctcgggcccggagccccaccccaccagcctctgggcctcagccactgctcaatggcagcatagtaccggcaccacctgccaccctagcaccaggagtgcatctggatgtggaggccctcatccccacacttgatgagcagggccggcccatcccggagtggaagcgccaggtgatggtccggaagctgcagcagaaaatgcaggaggaagaggagcagcggaggaaggaagaagaggaggaggcccggctggccagcctgcccgcctggagacgagacattcttaggaagaagctggaggaggagagggagcagaagcgaaaagaggaggagcggcagaagctggaggaaatccagagggcgaaagaacagtcggagaagctgcggacactaggatacgacgaggccaagctcgcgccctggcagcgacaggtcatcttgaagaagggggagatccctaagtaataggagtctcggcctcttgcgtgtagcctcacgagctctgagaaatggggagcggcccccagcccccgccccatcctgtcaggttggtgcggaagggtgggagccttgagcccttcccttcggtgcctgccggaatcttccctattcccctccctggccccacatccccaaccctgctgctggagtgctctcgcgaacccctgctgtcgcctggaaaaaaaaagtgcccaggctgctgacgcaaaaaaaaaaaaaa

SEQ ID NO: 984 - DNA, 1977 bp, Rattus norvegicus
  Genbank Accession No. NM_019623
gtcctcctctgggacagggaaggatgtcacagctgagcctctcctggctgggactggggcctgaggtggccttcccatggcagaccctgctactgtttggagcctcctggatcctggcccaaattctgacccagatctacgctgcctataggaactttcgtcgcctccgtggcttccctcagccccccaaacggaactggcttatgggtcatgtgggcatggtcactcctacagagcagggcttgaaggaattgactcggttggtgggtacctacccccaaggctttttgatgtggattgggccaatggtccccgttattactctgtgccactctgacatcgtccgatctatcctcaatgcctcagctgccgttgcgctcaaggatgtgatattctacaccatcctcaagccttggctgggggatgggctcctggtgagtgctggtgacaagtggagccgccaccgccgcatgctgacacctgccttccacttcaacatcctgaaaccctatgtgaagattttcaacgacagcaccaacatcatgcacgccaagtggaaacggttgatttcagaaggcagttcccgtctggacatgtttgagcacgtcagcctcatgactctggacagtctgcagaaatgtgtcttcagctttgacagcaactgccaggagaagtccagtgaatatattgctgccatcctggagctcagtgccctagtggccaaaaggcaccagcagcctttgctgttcatggacctgctgtacaatctcacccctgatgggatgcgcttccataaggcctgcaacctggtgcatgaattcactgatgccgtcatccgggagcggcgccgcaccctcccagatcagggtttggatgagtttctcaagtctaaggccaagtccaagactttggatttcattgatgtgctgctcctgaccaaggatgaagatggaaaggagctgtcggatgaggacatcagagcagaggccgacaccttcatgtttgagggccatgacaccacagccagtgggctctcctggattctatacaacctggcgaacgacccagagtaccaggagcgctgccggcaggaagttcaggagcttctgagggaccgagatcctgaggagattgaatgggacgacctggcccagctgcccttcctgaccatgtgcatcaaggagagtctgcggctgcaccccccagtcacggtcatctcccgatgctgcacccaggacattctgctcccagatggcaggaccattcccaaaggtatcatctgccttatcagtatctttggaattcatcacaacccgtctgtgtggccggaccctgaggtctacaaccccttccgctttgaccctgaaaacatcaaagacagctcacctctggcatttattcccttctcggcggggcccaggaactgcataggtcagactttcgccatgagcgagatgaaggtggcgctggcactaacactgctgcgcttccgactcctaccggacgacaaggaaccgcgcaggcagccagagctgatcctgcgtgccgagggcggactgtggctgcgggtggagccgctgacggcgggcgcgcagtgacctcacagttggtctggagcacccccaccatcctacctctgaggatcccagaatgaacagaactgtcacccataccagaatcttacggagggccagcagggggcgctgtgaatccagtgagtgggtgagagaggccagttagtgtctgagccaaagacctttgacttcgtctaactgatcgccagcctttatcataaggtgcattcttctccaaccaacctggactattctctggacaataggaagccaaagaaacgtctgagcaagagaccagaatgaaacgcaaatttgagctcttattctcgcagcaaatcccttattcagctccatttccattattttgacctacattcaaatcatctaataaatacattctctc

SEQ ID NO: 985 - DNA, 1395 bp, Rattus norvegicus
  Genbank Accession No. NM_019905
aggctctctgcaataggtgcccggcccagcttttttttcaaaatgtctactgtccacgaaatcctgtgcaagctcagcttggagggtgatcattctacacccccaagtgcctatgggtcggtcaaaccctacaccaacttcgacgctgagagggatgctttgaacattgaaacagcaatcaagaccaaaggcgtggacgaggtcaccattgtcaacattctgactaaccgcagcaatgcacagaggcaggacattgccttcgcctaccagaggaggaccaaaaaggaactgccatcggcgatgaagtcggccttgtctggtcacctggagaccgtgatgttaggcctgttgaagacacctgctcagtacgatgcctctgagctcaaagcctccatgaagggcctggggactgatgaggactccctcatcgagatcatctgctcaagaaccaaccaggagctgcaggagattaaccgagtgtataaggaaatgtacaagaccgatctggagaaggacatcatctctgacacatctggagaattccgaaagctgttggtcgcccttgcaaagggtaaacgggcagaggatggttctgttattgactacgagctgattgaccaggatgcccgggagctctatgatgctggggtgaagaggaaaggaaccgatgtccccaagtggatcagcatcatgactgagcgcagtgtgtgccacctccagaaagtgttcgaaaggtacaagagctacagtccttatgacatgctggagagcatcaggaaagaggtcaaaggagacctggagaacgccttcctgaacctggttcagtgcattcagaacaagcccctgtactttgctgaccggctgtatgactccatgaagggcaaggggactcgagacaaggtcctgattagaatcatggtctctcgcagtgaagtggacatgttgaaaatcagatctgaattcaagaggaaatatggcaaatccctgtactacttcatccagcaagacactaagggtgactaccagaaggcgctgctgtacctgtgtggtggggacgactgaagggcttggcatggtggattgcccagaagtggccctacctgtgccccaacctaatgttctagagaatcagcctgccactaatggacccctgaactcctccctgtgaagatgacgacagagctgccgacccatcccccatcttagctgcctttgcctggctttcccctcattctctcctttatgccaaagaaatgaacattccagggagttggacgtaccgtctgtgacatgagacacttcctcatatgtgtcgtgaataaaccatttttactttaaaaaaaaaaaaaaaaaaaaaaaaaaaaaaaaaaaaaaaaaaaaaaaaaaaaaaaaaaa

SEQ ID NO: 986 - DNA, 2065 bp, Rattus norvegicus
  Genbank Accession No. NM_020073
ggcgggggccgcggcggcgagctcggaggccggcggcggctgccccgagggacgcggccctaggcggtggcgatgggggccgcccggatcgcacccagcctggcgctcctactctgctgcccagtgctcagctccgcatatgcgctggtggatgcggacgatgtctttaccaaagaggaacagattttcctgctgcaccgtgcccaggcgcaatgtgacaagctgctcaaggaagttctgcacacagcagccaacataatggagtcagacaagggctggacaccagcatctacgtcagggaagcccaggaaagagaaggcatcgggaaagttctaccctgagtctaaagagaacaaggacgtgcccaccggcagcaggcgcagagggcgtccctgtctgcccgagtgggacaacatcgtttgctggccattaggggcaccaggtgaagtggtggcagtaccttgtcccgattacatttatgacttcaatcacaaaggccatgcctacagacgctgtgaccgcaatggcagctgggaggtggttccagggcacaaccggacgtgggccaactacagcgagtgcctcaagttcatgaccaatgagacgcgggaacgggaggtatttgaccgcctaggcatgatctacaccgtgggatactccatgtctctcgcctccctcacggtggctgtgctcatcctggcctattttaggcggctgcactgcacgcgcaactacatccacatgcacatgttcctgtcgtttatgctgcgcgccgcgagcatcttcgtgaaggacgctgtgctctactctggcttcacgctggatgaggccgagcgcctcacagaggaagagttgcacatcatcgcgcaggtgccacctccgccggccgctgccgccgtaggctacgctggctgccgcgtggcggtgaccttcttcctctacttcctggctaccaactactactggattctggtggaggggctgtacttgcacagcctcatcttcatggcctttttctcagagaagaagtacctgtggggcttcaccatctttggctggggtctaccggctgtcttcgtggctgtgtgggtcggtgtcagagcaaccttggccaacactgggtgctgggatctgagctccgggcacaagaagtggatcatccaggtgcccatcctggcatctgttgtgctcaacttcatcctttttatcaacatcatccgggtgcttgccactaagcttcgggagaccaatgcgggccggtgtgacaccaggcagcagtaccggaagctgctcaggtccacgttggtgctcgtgccgctctttggtgtccactacaccgtcttcatggccttgccgtacaccgaggtctcagggacattgtggcagatccagatgcattatgagatgctcttcaactccttccagggattttttgttgccatcatatactgtttctgcaatggtgaggtgcaggcagagattaggaagtcatggagccgctggacactggcgttggacttcaagcgcaaagcacgaagtgggagtagcagctacagctatggcccaatggtgtctcacacgagtgtgaccaatgtgggcccccgtgcaggactcagcctccccctcagcccccgcctgcctcctgccactaccaatggccactcccagctgcctggccatgccaagccaggggctccagccactgagactgaaaccctaccagtcactatggcggttcccaaggacgatggattccttaacggctcctgctcaggcctggatgaggaggcctccgggtctgcgcggccgcctccattgttgcaggaagaatgggaaacagtcatgtgactgggcactagggggctagactgctggcctgggcacatggacagatggaccaagaagccagtgtttggctggttgtctatcgggactggaccaggaagataaccaaaggaaaatggaagtggacgaagcagagaagaaggaagaggttttgcaggaattaaatatgtttcctcagttggatgatgaggacacaaggaaggcctattataaggaattc

SEQ ID NO: 987 - DNA, 3504 bp, Rattus norvegicus
  Genbank Accession No. NM_020075
ctctgcttttctctttcagagctgttgcgcagccattggtacctgtattggggaaacatagcatacaagcaagaagcttacagcctcagtggcgaaaaatttttcatgtcagagaccgagaactcttgcagtcgtttatgtcatcccttcttctccagacagaagataccaaaaagttgcaatcaaagatctgttcatcttattgataaagtcactaataagccaaaatgtctgtcaacgtcaaccgcagcgtgtcagaccagttctatcgctacaagatgccccgtttgattgctaaggttgagggcaaaggaaatggaatcaagacagttatagtcaacatggttgacgttgcaaaggcgcttaatcggcctccaacgtatcccaccaaatattttggttgtgagctgggagcacagacccagtttgatgttaagaatgaccgttacattgtcaatggatctcatgaggcgaataagctgcaagacatgttggatggattcattaaaaaatttgttctctgtcctgagtgtgagaatcctgaaacagatctgcatgtcaatccaaagaagcaaacaataggtaattcttgtaaagcctgtgggtaccgaggcatgcttgacacacatcataaactctgtacattcattctcaaaaacccacctgagaatagtgacattggtacaggaaagaaagagaaagaaaagaaaaatagaaagggcaaggacaaggaaaatggctctgtatccaccagtgagacaccaccacctccaccaccaaatgaaattagtcctccacatgctgtggaagaagaggaagatgatgattggggggaggatacaactgaggaagctcaaaggcgcagaatggatgaaatcagtgaccatgcaaaaggtctgacacttagcgatgatttggaaagaactgtagaagagcgtgttaacatcctgtttgattttgttaagaaaaagaaagaagagggcattattgattcatctgataaagacattgtggctgaggcagaaagactggatgtaaaagccatgggccctctcgttttgacagaagttctctttgatgagaagataagagagcaaatcaagaaatacaggcgccattttttaagattttgtcataacaacaaaaaggcccagcggtaccttcttcatggtttggaatgtgtggtagcaatgcatcaagctcagttgatctccaagattccacatatcttgaaggagatgtatgatgcagaccttttagaggaagaggtcattatcagctggtcagaaaaggcctctaagaaatatgtctcaaaagaacttgccaaagagattcgtgtcaaagcagagccatttattaaatggttgaaggaagcggaggaggaatcttctggtggtgaggaagaagacgaagatgaaaatattgaggtggtatattcgaagactgccagtgtaccaaaagttgaaactgtgaagtctgacaacaaggatgacgacattgatattgatgccatttaaaaggatggatgcaacttagcttaacagtgtaatgctgcaaatttttctccattatcagccagaagtgcaacatgtatgtgcaagagctaaagtggcttaacatcatgctacacttgatactaaaaagctattactgtgagtggtctataattaagcccaatgagacatctagggagtccatacatatcagtgagcagttgtagtttgcttatttatagcatgtttctttcggaaaaactagtggtggacacatttggatcacatttatacagttataaaaaataaagatttgattttggtcattcttcagactttgggctatgaatggcttatgctgaagtaattggctacttttaggatgttacaccatttaataacttagacttcttaagtttggtagattgttaggtactgaagacttgaagaatgcaaacaattataatgaccttactcagccattaagaaatgaagtattttgaaagttgtgtctccagtccattgagattggcaactgacaattcttgtcattctaaggaaatttgatgatttaatgacagtgtgacatcctcatgagaagtaaaaatgacctgtgtgtcctatggtttaagagcaaattttgaaacttggagttgtggtttttcagtttgtgtacactcaccccaaattgtagtctattgagtcatgtgcattgcacgttggataagccagggaaatgacaaataagtattttgtgtgtatttagtggttgctttgtactgagagaaaagctttgaggtgtgattaaatcgtaaactctgattctatttgggagaaacaggaaaaaggtgcacttaatctaaaacagcataagttttcaacttttacccttaaattataatttcaagatgtttagacatactgtatcttgtgtttgatgtgttccccctccctaatattatggtttattctttaatgccttttaatttggatataatagcttgtactttagattttggttgctatcttgccaaaataagtgttactgtttttcaagcttgatccccttccctgattgtcttatttaaagagaaagttaaactcatacttctgagtcagagcctgtattttggttaagacttgggatattttttacttcacattgaatatagctggatacctgagaagtctggtgatggcactgggtgggtgcagctagctaaggcctgaccagcccattcagagccttggacttcagacacaaaagtgagtttcttacccacttgctggtgtaaactctatctggggtcctgactatatttgaatacttgtcttcaatattaaaaaacatagcacatttttctttctacaaaagtacattctggagttaagaacccatgtggttgatttgtgtgtggcgtgctagctcatacattatttggatcttattctttgtgtcatccatctcacagattataagactttgattaatgtaaaaagtatgcgttaaaatcataccaaacatttggtaaaattaaaaccttgatgggaggctgggcgtggaacaggagccatatacctggaatggtaacaggggaatgtgctatgtcacaccaaagaagtgggacttggaaagtcacttgtctcctgggtttcagactctttgttgcatgggcagcccatccatatgtcattactttttgagattctcaagtagatcagcacatttcggcctcaggttggcaagattttgtcttagagctgttgctttaaagggaaatggtcaggtcttagacacttaggaaggtcttgggcttctgttcattctggtgccaaaccagtgggattcaaatttcacacaatctgggtttttattcatggaggttaacctggtaagagtaatccttcatggctctattgaggtgtcttaaaaagtttcctgtttcaaacagctacattacttgattaaaacaatgttataaaattaaatttccccctcctttcatattaa

SEQ ID NO: 988 - DNA, 1254 bp, Rattus norvegicus
  Genbank Accession No. NM_020076
cccgacaggagacagagcacattgtagctctccaactgccggattacctggcgaccacgttgtggtcagaagagtcctgcctgccggccatggagcgctgtgtgagagtgaagtcttgggtagaagagaatcgggcctcctttcagcctccggtttgcaacaagcttatgcaccgggagcagctcaaaatcatgttcgtcggaggccccaacaccaggaaggattatcacattgaagagggagaggaggtgttttaccagctggagggagacatggtgctccgagtcctcgagcaaggagaacaccgggatgtggttatacgacagggagagatattcctcctgcctgccagggtgccccactccccgcagaggtttgccaacaccatgggcctggtgattgagagaaggcgaatggagaccgagctggatgggctgaggtactatgtgggcgacactgaggatgtcctcttcgagaaatggttccactgtaaggaccttgggacgcagttagcccccatcatccaagagttcttccactctgagcagtaccgaacaggaaagcccaaccctgaccaactgctcaaggagccgccattcccgctgagtacacggtccgtaatggagcccatgtcactgaaggcctggctggagagccactccagggagcttcaggcaggcacatccctaagcctgtttggggacagctatgagactcaggtcatcgcccacggacaaggcagcagcaaaggcccgagacaggatgtagatgtgtggctgtggcaactggagggctcctctaaggtgacaatgggaggacagtgtgtggccctggccccagatgacagcctgctggtgcccgctgggttctcgtacatgtgggagcgagcgcaaggctctgtggccttgtctgtgacacaagaccctgcctgtaagaagccactggggtgacccttctgtgtgggcccaaagcagccacagggtgcctgagtgctgtcctgacagctgccctttccagacagctctttcagcctcatgacatctccgtggacattgacagggcccctccgtgatcgtgggctgtcactggcatccaccctgctgtcatgcttagctcaggatgcagaggggattcctaggacaccagtagttcccctctctcctaacagccctacactgtcagcgaggtgcataccgtcctcatgcgcctgtcagcctaacactaagaaatctctcaataaaggcctcctgctgg

SEQ ID NO: 989 - DNA, 4128 bp, Rattus norvegicus
  Genbank Accession No. NM_020306
ggttccggctgtgggcagcagggtggtccgcgactgcggccggaagcaggctgagcggctctcggcgagcgccgcctgtacttccggggacttcagcctagctcttgagttttccctgtaggcggcgcgggagggaaaagtttgcagggccgtgctgggaagatcacctccgcttcccaatgtgagcagtttctcgaacgctctctctagaaggttgcccagagaggtggtggacgggaacatgaggcagcgtctcctcttcctgaccactttggtgcctttcgtcctggcaccccgacctccggaggaaccaggctctggctcccacctgcgacttgagaagcttgattctttgctctcagactacgatatcctctctttatctaatatccagcagcactccataaggaaaagggatctacagtctgcgacacacttagaaacactactaactttttcagctttgaaaaggcattttaaattatacttgacatcaagtacagaacgcttttcacagaacttgcgagtcgtggtggtggatgggaaagaggaaagcgagtacagtgtgaagtggcaggacttcttcagcggacatgtggttggtgagcctgactctagggttctagcgcacataggagatgatgatgtcacagtaagaatcaacacagatggggcagaatataacatagagccactttggaggtttgttaatgatactaaagataaaaggatgctggtgtataagtctgaagatatcaaggatttttcacgtttgcagtctccaaaagtatgtggttatttaaatgcagatagtgaagagttgcttccaaaagggctcatagacagagagccatctgaagagtttgtccgtcgagtgaagaggcgagctgaacctaacccattgaagaatacttgtaaattactggtggtggcagatcatcgattttataagtacatgggccgaggagaagagagcactactacaaattacttaatagagttaattgaccgagttgatgacatataccggaacacctcgtgggacaatgcaggatttaaaggttatggagtacagatagaacagattcgaattctcaagtctccacaagaggtaaaacctggtgaaagacacttcaatatggcaaaaagttttccaaatgaagaaaaggatgcttgggatgtgaagatgctgctggagcaatttagccttgatatagctgaagaggcctctaaagtctgcctggctcatcttttcacctaccaagattttgatatgggaactcttggattagcttacgttggttctcccagagcaaacagtcatggaggggtttgtccaaaagcttattacaacccaggtgtgaagaagaacatctatttgaatagtggtctgacaagtacaaaaaattatggtaaaaccatccttacaaaggaggctgacctggttacaactcatgaattgggacacaattttggagcagaacatgatcctgatgggctggcagagtgtgccccaaatgaggaccaaggaggaaagtatgttatgtaccccatagctgtgagtggtgaccatgagaataataagatgttttcaaactgcagtaaacagtccatctacaagaccatagaaagcaaggctcaagagtgcttccaggagcgcagcaacaaggtgtgcggcaactccagggtggacgaaggagaagagtgtgacccgggcatcatgtacctgaacaacgacacctgctgcaatagtgactgcacactgaagccaggtgtgcagtgcagtgataggaatagtccttgctgtaaaaattgtcagtttgagacggcccagaagaagtgccaggaggctatcaatgctacttgcaaaggagtgtcttactgcacagggaatagcagtgagtgccccccaccaggagatgctgaagatgacactgtgtgcttggacctgggcaagtgcaaggctgggaaatgcatccctttctgcaagagggagcaggagctggagtcctgcgcatgtgctgacaccgacaactcgtgcaaggtatgctgcaggaacctttctggcccatgtgtgccttacgtcgatgcagagcaaaagaacttatttttgaggaaagggaagccctgtacagtagggttttgtgacatgaatggcaaatgtgagaaacgggtacaggacgtaattgagcggttttgggatttcattgaccagctgagcatcaacacttttgggaagtttctggcagacaacatcgttgggtctgttctggttttctccttgatattttggattcctttcagcattcttgtccactgtgtggataagaaactggacaagcagtatgagtccctgtctctgtttcatcacagtaacattgagatgttgagcagcatggactcagcatctgttcgcattatcaagccgttccctgcaccccagactccaggtcgtctgcaggccctgcagccggctgcaatgatgccgccagtgtctgcggctccaaaactggatcaccagaggatggacaccatccaggaagaccccagcacagattcacatgtggatgatgatggctttgagaaggaccccttccccaacagcagtgcagccgccaagtcctttgaggacctcacagaccacccagtcaccaggagtgagaaggccgcctccttcaagctgcagcgtcagagccgagttgatagcaaagagacagagtgttagtgggagcctgggcctgctctgggggacacagacctacagatgttccacagagctgacctgaatcaaaatagactgtaatgatctgagaaacgggagcagcttagcagatgctggtcatgtgacaggaccttcacatgacatcctgtgtatgtaggccctttgaagaggtgaggtaaatctggcttatttaaggctttcaggttttggggttttcttttgtaatctaaaaatctcctttgacctgtggtgcagaagcagaaaataaggctggatcaagttcctggtgacagcactgattaagccttcagtctgtttttctgtatgctgtaaggtcctctcactacggtgaagcacttagcagtgaggataactggaacacagactttttgggggttttggccttcacatgtgcgttgtctccaaatgccgtctgtcttggcactgaactttgtggatacagtcctttccaagatgaagactagctctggaacagtctatacaaacagccacatgaacttcaagatggcctattaactgcttagccccaggttccctggacagtttttccgttttgcaaaaagtgtcttcacgggtctctaaacattgtttgtcttaaaaaatactgggctggagagttggccccacagttaagagcacttggtttcattcccagtacccacacggtggctcttaactccaatcccaggggagatgacatcttctgaactctagaacacaaggcatgcattggtgcagtcaaacatgcaggcaacacacacaaatttagaaagccaagtgctgtaagaagttgcacatcccccaacctacagtgcttcgcggtctgagctggagtggagctctctcctgaacactctggaaggctggcaggtgctgagctggctagggagacgggtggggcccagccctggaagaaccgtcttcagcctcagcaagcagacactcgcgttacctcaggctttggggcttcaggacccaggatgttttgtacttattgtgtgaggataaataccattagcctgaattctcatttctgtaagttttagttataaaagctttttttcttctaagaattgcaatgtgctcaccagcaaacacgtcttaaccagaataacttgtaactctgaggacagttaaccaaacctgtgccttgtctctcctgagggtgtctgttacactaatacttgaacatgtaccttgtggtattggctccttttactagtcatgacagccttatatgttagttacactttgaggatttgctctaaggtgagtggggtgtgtgggtgtatgtatgaatgaaacagttggcagaatataagaaaaccatttttataaaattgtgactttttaaaacaaaaaaaaaaaaaaaaaaaaaaaaaaaa

SEQ ID NO: 990 - DNA, 539 bp, Rattus norvegicus
  Genbank Accession No. NM_021261
cctcggcctccgggctgcgggaacgcccggactgggaacgccacgtcgagaggcgttcgcggaaggcgcgggatccaggacgtgctggtcacccccaaaccccaggccacccattatcgccttggttcgcccatcagagttgtaagaaaatggcagacaagccggacatgggggaaatcgccagcttcgataaggccaagctgaagaaaaccgagacgcaggagaagaacaccctgccgaccaaagagaccattgaacaggaaaagaggagtgaaatctcctaaaagcctaggaagatttccccaccccaccccttcatctccaagaaccccctcgtgatgtggaggaagagccacctgcaagatggacgcgagccacaagctgcactgtgaacccggcactccgcgccgatgccaccggcccgtgggtctctgaaggggacccccccactaatcggactgccaaatttcaccggtttgcccagggatattatagaaaattatttgtatgattgatgaaaataaaacacacctcgtggc

SEQ ID NO: 991 - DNA, 1733 bp, Rattus norvegicus
  Genbank Accession No. NM_021593
ccacgcgtccgagctcctacctgagcagaggtattctggcagcaatggcatcgtcggacactgaaggaaaaagagtggttgttatcggtggtggtttggttggagcattgaacgcgtgctttctcgcaaagaggaatttccaagttgatgtgtacgaagctagggaagatattcgagtggctaactttatgcgtggaagaagcattaatttggccctttcttatagaggacggcaggccttgaaggccgttggtctggaagatcagatcgtgtccaaaggtgtgcccatgaaagccagaatgatccactctctctcgggaaagaagtctgcaattccctatgggaacaagtcacagtatatcctttcaataagcagagaaaagttaaacaaggatctgctgactgccgtggagtcctaccccaatgcaaaggtgcactttggccacaagctgtcaaaatgctgtccggaggaagggatactcacgatgcttggacccaacaaagttcccagagacatcacgtgtgacctcattgtaggatgtgatggggcctactcaactgtcagagctcacctcatgaagaagccccgttttgattacagtcagcaatatatccctcatggctatatggagctgacaattccacctaagaacggggagtatgccatggaacctaactgtcttcacatttggcctagaaatgcctttatgatgatcgccctaccgaacatggacaaatctttcacatgcaccttgttcatgtcctttgaggagtttgaaaagcttccaacgcatagtgatgtgctggacttcttccagaagaactttccagatgccatccctctgatgggcgagcaagccctcatgagagatttctttctgttgcctgcccagcccatgatatcagtaaagtgctctcccttccacctgaagtcacgctgtgtgctgatgggagatgcagctcatgccatcgtcccattttttgggcaaggaatgaatgcgggctttgaagactgcttggtatttgatgagttaatggacaaattcaataatgatcttagtgtgtgccttcctgaattctcaagatttaggattcctgatgaccatgcaatttcagacctgtctatgtacaattacatagagatgcgagcgcatgtcaactctaggtggttcctgtttcaaaggctcctggataaatttcttcatgcactaatgccatccactttcatccctctctataccatggtcgccttcaccagaataagataccacgaggcagtgctgcgctggcattggcaaaaaaaggtgataaacagaggactctttgtccttgggtccctggtagccattggaagtgcctacatactcgtgcaccacctgtccccgagacctctggaactcctgagatctgcctggacgggaacctctggccactggaataggagtgcagacatttctccacgagttccatggagtcactaggacaaatgccccagttcactatccatagtgtcaacgttccgggtagcaaatgcttgattcctcttcaatatcaagggagaaactcatgttcccattgccgtcttcagttcactatgggaaaatcattgtcagcatataattaagttcggagtggagggctgtttttacagtgtctcattattttgcatgcttggactgggttcaatttttaaatttaaaaacacaataaccaaaaaaaaaaaaaaaaaaaaa

SEQ ID NO: 992 - DNA, 2106 bp, Rattus norvegicus
  Genbank Accession No. NM_021653
gctgagatggggctgtcccagctatggctgtggctgaagcggcttgtgatattcctgcaggtagccttggaggtggctacgggcaaggtgctaatgacactgttcccagagagagtcaagcagaacatcctggccatgggccaaaagaccggaatgaccaggaatccccgattcgcccctgacaactgggtccccaccttcttcagcatccagtacttctggttcgtcctgaaggtccgctggcagagactggaagacagggctgagtatggggggctggcccccaactgcaccgtggtccgcctctcaggacagaagtgcaacgtctgggatttcattcaaggcagcagacccctggtgttgaacttcggcagctgcacctgaccttcatttcttctcaaatttgaccagttcaagagactcgtagacgactttgcctccacagctgacttcctcatcatttacattgaagaagctcacgccacagatggatgggcttttaagaacaacgtggacatcaggcagcaccgaagcctccaggaccgcctgcgggcagcacatctgctgctggccaggagcccccagtgtcctgtggtggtggacacaatgcagaaccagagcagccagctctatgcagctctgcctgagaggctctatgtgatacaggaaggcaggatctgctacaagggtaaacctggcccttggaactacaatcctgaggaagtccgagctgttctggaaaagctttgcatcccacctggacacatgcctcagttctagggggccagcaggaaggtcccccaagcttggtactcctccccaccagtacagatgtcctttagctttgaccttcgttcccagatcaattactagctcagatttttctgatctgaacaaataactacccgggaggcaattcagttcacagcacccaaccagcacaaattgttacaaccagagataaagcaataccgagctgttagcaaaagtaagtgtgcagctttgcaccactcccacaggcggagaccaatccagtgtgtgccccttctggtggaagggtactcatgcttggttggctgacttctgaagtgtagtgactcatgatgatgacgtcaaaagctcaatccatttgcccaagtttgccactcatagaatcagttgtttagtaccaagcgacaggcaggcgtatttctacttgtaggaaccaaagacattggaaacacttttctggccctaagattgaaatccgttaatattgttggtgataggtgtttccatggcaacctataatctaattctgctccctctaccatctttgaatagattgcagagaaatctggctctctggtactgacacaaaagctttataactttaactaaaccaaatcacaggcgccagcaaaagctgccattcccctgctgtaactctgttccactggcgcccagtctcttactggtctttcatgttagatggctttggactgacgggtagccatgggttcatctgtcatgtctgcttctttttatatttgtttatgatggtcacagtgtaaagttcacacagctgtgacttgatttttaaaaatgtcgggaagatgcagcaagctaacgattaaaatccgtcaggctatttttgaatggctccggtgtgatccttacaatttcctttctgacttgtgtatgtgggcctgctctgccgtcttttccgatagcccacgtgtaatgtaatcagctaaggcatcgtttgcctggagggaccccgtcctggaggaagaagctcgtatgtggcacgcatccaacatgttgtcctgtgaagtgttgtggaagggacgtggctgttcacgtcacagcaaagcacctttaggggtgatgcgtgaatggacctggggagcattctccaggcatccaaacagttcctccttgctctgccttagggctacacccaatactgtaacattgcatttatgtatggatttaggtgagtcaggatctagctataaagtcgagagtggctgtgaacttacaatcttcagactcagagtagctgggattccaggtctgtccccctatataaaaaatgcttttgacctcttgaaaaaaaaaaaa

SEQ ID NO: 993 - DNA, 1582 bp, Rattus norvegicus
  Genbank Accession No. NM_021688
gaaagggagcggcggcgggaggcgcggagcgcgggcgccgggaagatgctgcagtccctggccggcagctcgtgcgtgcgcctggtggagcggcaccgctcggcctggtgcttcggcttcctggtgctgggctacctgctctacctggtgttcggcgccgtggtcttctcgtccgtggagctgccttatgaggacctgctgcgccaggagctgcgcaagctgaagcggcgcttcctggaggagcacgagtgcctgtcggagccccagctggagcagttcctgggccgcgtgctggaggccagcaattatggagtgtcggtgctcagcaacgcctcggggaattggaattgggacttcacctcggcgctcttcttcgccagcacggtgctctccaccacaggctatggccacacggtgcccttgtcagatgggggcaaggccttctgcatcatctactctgtcattggcatcccgttcaccctcctcttcctgacggccgtggtccagcgtgtcaccgtgcatgtcacccgcagaccggtcctctacttccacatacgctggggcttctccaagcaggtggtggccatcgtccatgccgttctgctgggattcgtcaccgtgtcctgcttcttcttcatcccggccgccgtgttctccgtgctggaggatgactggaacttcctcgaatctttttacttctgtttcatctccctgagcaccatcggcctgggggactacgttccaggggaaggctacaaccagaagttccgggagctgtacaagatcgggatcacgtgttacctgctcctgggactcatagccatgctggttgtcctggaaaccttctgtgagctccacgagctgaagaaattcaggaaaatgttctatgtgaagaaagacaaggatgaagaccaagttcacatcatggagcatgaccaactgtccttttcctccatcactgagcaggcggccggcctgaaggaggagcagaagcaaaacgagccttttgtggcctcccagtcaccaccctatgaggatggctctgcaaaccattgagcatgggtcaccagaccccggacatgaggcagagcctagactgtgttcatttttacgagaaagtcaaagctaagatgatgttattttaagaaatatctactgttaacaatattttaaaaacacggaactttggatcctgggggagtgggttttaatctctgggcaaatgaggtgtgcacccataactcacaggcaatgtgatcacctgacatcatgcagctgtaactcacaggcgatgtcatcacctggcatcctgcacctgtaactcacaggtgatgtcatcgcctggcatcctgcacctgtaactcacaggtgatattatcacctggcatcctgcacctgtaactcacaggtgatgtcatcacctggcatcctgcacttgtaactcacaggttgatgtcatcgcctggcatcctgcacctgtaactccacagttgatgtcatcacctgggcattacacactggggaagaaatacttgaaacatgttactgcaccggaaatcccattctaaaaccaaacttacta

SEQ ID NO: 994 - DNA, 2070 bp, Rattus norvegicus
  Genbank Accession No. NM_021745
ctgagttctgagcgtctacagcgaaagtgctgggctttggaaaggagacctgggctccgaatcctctcagggccttggacgtctctgacccaaaacaatccaaggttcttatttgaagaccaccatcccagaagcacattctcgagttgaaaagttggagtggtgttcgaaatgaatctgattgggccctcccatttacaagccacggacgagtttgctctttctgaaaacttatttggagtgctaacagagcacgcggcaggtcctctggggcagaatctggacttggaatcgtactccccatacaacaatgtgcagtttcctcaagttcagccacagatctcctcctcgtcctattattccaacctgggtttctacccgcaacaaccggaagactggtactctcctggactctatgaactcaggcgaatgcccactgagagtgtgtaccagggagagactgaggtatccgagatgcctgtgacaaagaagccgcgaatggccgcctcatcggcgggaagaataaaaggggatgagctgtgtgtggtctgcggagacagggcctctgggtaccattacaacgcgctcacctgcgagggctgcaaaggtttcttccgaagaagcatcaccaaaaacgccgtgtacaagtgtaagaacgggggcaactgcgtgatggatatgtacatgcgtcggaagtgccaggattgccggctaaggaagtgcagagagatgggaatgttggctgaatgtttgttaactgaaattcagtgtaaatctaaacggctaaggaaaaatgtgaagcagcatgcggatcagacagtgaatgaggacagcgaagggcgtgacttgcggcaagtgacctccacgaccaagctatgcagggagaaaactgaactcactgtagaccagcagaccctcctggattatattatggactcatacagcaaacagagaatgccacaggagatcacaaataaaatcttaaaagaagaatttagtgcagaagaaaattttctcatattaacagaaatggctaccagtcacgtacagattctcgtagaattcacaaaaagacttccagggtttcagacactggaccacgaagaccagattgctttgctcaaagggtccgcagtcgaggccatgttccttcgttcagcggagattttcaataagaaacttcctgccggacacgcagacctgttggaagaaagaattcgaaagagcggcatctccgatgagtacataaccccgatgtttagtttctataaaagtgtcggggagctgaaaatgacccaggaagagtacgctctgctcacagcaattgtcatcctctctccagacagacaatacataaaggatagagaggcagtggagaagcttcaggagcctctgctcgatgtcctacaaaaactctgcaagatctaccagcccgagaaccctcagcatttcgcctgcctcctgggtcgcctgacagaactccggacattcaaccatcaccacgctgagatgctgatgtcttggagggtgaatgaccacaagttcaccccgctcctctgtgagatctgggatgtgcagtgaaggacacggggagaggctagctccttgtcctcctcagagcagcaacctggtattggacttcccttcttttcatttgtaccaggtctcactcaagaatctcaatgaatatttatgtggcaattatacaattcccacaactgtaaatacaggctccatagaattgcttcccctacactgtattttacaaggcttcgggaaaccccactgacacgccctttttgcctcattaaatcaattgttacttcaattttgtcaactgagctagggaccgcctcgttttatcctccatgcggcaacattatatatatatatattttatcaaatagctgttttctcttccttttttttttttttttttttcggagctggggactgaacccagggccttgcgcttgctaggcaagcgctctaccactgagctaaatccccaacccctattaaatagctgttttcaactgagacaataaactgaacgtaatgccaagagaa

SEQ ID NO: 995 - DNA, 2413 bp, Rattus norvegicus
  Genbank Accession No. NM_021750
cttccgggctcgggagccgcgacaggagggggcctctgaaaagggtcctgttctgagaagtccattgtgtaccttgtcaccagcgcgtctgaaccctctctgaaccttcctgaagctggaagatttcaccctgatggctgactcaaaaccactcagaaccctggatggggaccctgtggctgtggaggctttgctccgggacgtgtttgggattgtcgtagatgaggccattcggaaggggaccaatgcctctgagaaggtctgcgaatggaaggagcctgaagagctcaagcagctgctggacttggagctgcagagccagggcgagtctagggagcggatcctggagcgctgccgggctgtgattcattacagtgtcaagactggtcacccccggttcttcaaccagctcttctcaggattagatccccatgctctggccgggcgcatcattacggagagcctcaataccagccagtacacatatgagattgcccccgtgtttgtgctcatggaagaggaggtgctgaagaaactccgtgcccttgtgggctggaacactggggatggggtcttctgtcctggtggttccatctctaacatgtacgccataaacctggcccgctttcagcgctacccagactgcaagcagaggggcctccgggccctgccacccttggccctcttcacttcaaaggagtgccactactccatcaccaagggagctgcttttctgggacttggcaccgacagtgtccgagtggtcaaggctgatgagagagggaagatgatccctgaggatctggagaggcagatcagtctggcagaggctgagggctcggtgccatttctggtcagtgccacctctggtaccaccgtgctaggggcctttgaccccctggatgcaattgccgatgtttgccagcgtcacgggctgtggttacacgtggatgccgcctggggtgggagcgtcctgctgtcccggacacacaggcatctcctggatgggatccagagggctgactccgtggcctggaaccctcacaagcttctcgccgcggggctgcagtgctctgctcttcttctccgggacacctcgaacctgctcaagcgctgccacgggtcccaggccagctacctcttccagcaagacaagttctacaacgtggctctggacaccggagacaaggtggtgcagtgtggccgccgcgtggactgtctgaagctgtggctcatgtggaaggcgcagggtgggcaagggctggagtggcgcatcgaccaggcctttgctctcactcggtacttggtggaggagataaaaaagcgggaaggatttgagttggtcatggagcccgagttcgtcaacgtgtgcttctggtttgtgcctcccagcctgcgggggaagaaggagagcccagattacagccagaggctgtctcaggtggcccctgtgctcaaggagcgcatggtgaagaagggaaccatgatgatcggctaccagccccatgggacccgggccaacttcttccgaatggtggtggccaaccccatactggtccaggccgatatagacttccttctgggcgagctggagcgtctgggccaggacctgtgagctgcttcctctctctgccccacccaagctctgcataagctcctgggttcccaaaagcgacctttctaggaaacagtggccttgactgtgtgagcccccacacactaactctcctagctaagtattggctgccaggacggtgtctaagcacactacagtctgttcttacgaaatgtgcttcttttaagtcggtcatagtggtacacaccgttaataccagcactggggaggcagaggcagacacaagcagatctcttgagtttgacgccagcccggtctacagagctggcctacacagaaaaaaaacctgtcccaaaaaaaaagaaaggaaggaagtaagaaaggaaaagaaagaaatatttttcattaagattatgtctataaaaaattgttattaatatgagagatatggtacgatgtattaagaaagctagatatgggggttggggatttagctcagtggtagagcccttgcctaggaagcgcaaggccctgggttcagtccccagctccgaaaaaaagaaccacaaaaaaaaaaaaaaaaaaaaaaaaaagaaagctagatatgagtttatatatcatggtatctgagttagactaaaaaaaaaaaatacataggaaaaggcggtgagtggaactgtgccaaaggtcagcagttttccctggaggaggataacaggctgttcctaagtcagcctctcagaccttccctgcttccccactttattatgtaaccacatcacctacttctgagatataacaataaagctttgtcactataaaaaaaaaaaaaaaaaa

SEQ ID NO: 996 - DNA, 1980 bp, Rattus norvegicus
  Genbank Accession No. NM_021754
ggcacgagggaacgtctaggcaacgtggtctccccgcccgcgggtaggcaaaggcgtttgcgcttcccagcgtctgaggcctagggagccttcagtagccgaaagttagtcttttgcagtggagtaagggctcgcggttagccgcgtagcgcccggatctggcctcaccatgttggtcctatttgaaacgtccgttggctacgccatctttaaggttctgaatgagaagaaacttcaagaggttgatagtttgtggaaagaatttgaaactccagagaaagcaaataaaatagtaaagctaaaacattttgagaaatttcaggatacagcagaagcattagcagcgttcacagctctgatggaaggcaagatcaataagcagctgaaaaaagttttgaagaaaatagtcaaagaagcccatgaacctctggctgtagctgatgctaagctaggaggggtcataaaggaaaaattgaatctcagctgtatccatagtcctgttgttaatgaacttatgagaggaatacgatcacaaatggatggcttgattcctggggtagaaccacgggagatggcagccatgtgtcttggactagcccacagcctatctcgatacagattgaaattcagtgctgataaagtagacacaatgatcgttcaggcaatttccttgttagatgacttggataaagaactaaacaactacattatgcggtgtagggaatggtatggctggcattttcctgagttagggaaaattatttcagataatttgacatactgcaagtgtttacagaaagttggagacaggaagaactatgcatctgccactctttctgaattcctgtcagaggaagtagaagctgaagtgaaagcagctgcagagatctctatgggaacagaggtttctgaagaagatatttgcaacattctacatctgtgtactcaggtcattgaaatttctgaatatagaactcagctgtatgaatatctgcaaaaccgaatgatggccattgcacccaatgttacagtcatggttggggagttggttggagcgcggcttattgctcatgcaggttctcttttgaatttggccaagcatgcagcttctacagttcagattctgggagcagaaaaggcacttttcagggccctcaaatctagacgagacacacctaaatatgggcttatttatcatgcttctcttgtaggccagacgagtcccaaacacaaaggaaagatttcacgaatgctggcggccaaaactgtgttggctatcagatacgacgcctttggtgaagattccagctctgcaatgggagctgagaacagagccaaattagaggccagattgaggattttggaggacagagggataagaaaaataagtggaacgggaaaggcattagcaaaagcagaaaagtatgaacacaaaagtgaagtgaagacttacgatccctctggtgactccacacttccaacttgttctaaaaaacgcaaaatagaagaggttgataaagaggatgaaattactgaaaagaaagcaaaaaaagccaagattaaaattaaagctgaagtagaggaggagatggaggaggcggaggaagaacaggtagtagaagaggagccgactgtaaagaagaaaaagaagaaggataaaaagaaacacataaaggaagagccactttccgaggaggagccatgcaccagcacagcagttcctagtccagagaaaaagaagaaaaagaaaaaaaagaaagatgctgaagactaatgtaaaggaaccgtaatcctgtcacctgaacacatcatgcttaagattcagttgggagcatatcagacgctctaacataatcaagggaggttgattagctttagcttttcaaacctttttgtgtcttgacatcaactgttaaccttagagtctttgatacacaaataaaaatattttctttgtattataaaaaaaaaaaaaaaaaa

SEQ ID NO: 997 - DNA, 3091 bp, Rattus norvegicus
  Genbank Accession No. NM_021755
gccaacccagatcccgaggtgcgccacgcccagcccagatctccacgcctgccaggagcgagcttcgccggctcgctgtcccccgagcagcctctgtccttctgtccgagtcccgcgcccttctcgggacccctgcccagcggcagcactgccaccctgccggccatggagaccccgtctcagcggcggcccacccgcagtggggcgcaggccagctctacccctggtcgcccactcggatcacacggctgcaggagaaggaggacctgcaggagctcaatgaccgtctggccgtgtacatcgatcgcgtgcgctccctggagacggagaacgcggggctgcgccttcgcatcactgagtctgaagaggtggtcagccgagaggtgtccggcatcaaggcggcctacgagcgagctgggggatgcccgcaagaccctcgactctgtggccaaggagcgcgcccgcctccagttggagctgagcaaagtgcgtgaggagttcaaggagctgaaggcgcgcaataccaagaaggagggggatttgttggctgcgcaggcccggctcaaggacctggaggctcttctcaactccaaggaggctgccctgagcactgctctcagtgagaaacgcacgttggaaggcgagctccatgatctgcgggggcaggtagccaagcttgaggcagccctgggtgaggctaagaagcaactccaggatgagatgctgaggcgagtggatgctgagaacaggctacagaccctgaaggaggagctggatttccagaagaacatttacagtgaggaactgcgtgagaccaagcgccggcacgagacccggctggtggagattgataatgggaagcagcgagagtttgagagccggctggcagatgctctgcaggagctgcgggcccagcatgaggaccaggtggagcagtacaagaaggagctagaaaagacatactctgccaagctggataatgcccggcagtctgccgagaggaacagcaacctcgtgggagctgcccatgaggagctccagcagtctcgaatccgcattgacagcctctcagcccagctcagccagctccagaagcagttggcagccaaggaggccaagctgcgtgacctggaggactccctggcccgtgagcgggataccagccggcgcctgctggctgaaaaagagcgggagatggctgagatgcgggcaaggatgcagcagcagctggatgagtaccaggaattgctggacatcaagctggccctggacatggagatccatgcctaccgaaagctgctggagggcgaggaggagaggctacgcctgtcccccagccctacctcgcagcgcagccgtggccgcgcctcctcccactcctcccagtctcagggtggaggcagcgtcaccaaaaagcgcaagctggagtcttctgagagccggagcagcttctcgcagcatgctcgcactagcggccgtgtggccgtagaggaagtagatgaagagggcaagttcgtgcggctgcgcaacaagtccaacgaggaccagtccatgggcaactggcagatcaggcgtcagaatggtgatgatcctttgatgacttatcgcttcccaccgaagttcaccctaaaggccgggcaggtggtgacgatctgggcttcaggagctggggccacccatagcccccctactgacttggtgtggaaggcacagaacacttggggctgtgggagcagccttcgcacggctctcatcaacgccactggagaagaagtggccatgcgcaagctggtgcgctcactgaccatggttgaggacaatgacgatgaggaagaggatggagatgagctgctccatcaccaccgtggctcccactgcagcagctcgggggaccccgctgagtacaacctgccgtcagcaccgtgctgtgcgggacatgtgggcagcctgctgacaaggctgccagtggctcaggaccgcaggtgggcggatccatctcctctggctcttctgcctccagtgtcacagtcactcgaagcttccgcagtgtggggggcagtgggggtggcagcttcggggacaacctagtcacccgctcctacctcctgggcaactccagtccccggacccagagctcccagaactgcagcatcatgtaatctgggacctgccaggcgagggtgggggcagaggccacctgctccctcttcaccacatgccacctcctgccctgttccttatgagagcaggtctgaagccaaagaaaactatcccctgcctttgggtgtttttcttttttccttctattttttttctaagagaagttattttctacagtggttttatactgaaggaaaaacacaagcaaaaaaaaaaaagtgtctttatctcaatccttagtccttcccttttccctgtatctgccttaaaccaaagggcttctcataggagcccagggaaaggactgcttttgtagtctagatttttgtcctgctgccttgcgtttgccctcatcccaggaccctgtgacacggtgcctgagaggcaggcatggagttctctttaccggcctcctccacagctggcccactgccatgccagctgcaaagaaaaggggtgcagagagaatgactgaaaggtcaagcccctcctggctcactacacttggccgagactcctctgcctgccttaccctcctgccttcccgagcctgggacgagtggattcccagaggcaaatctgccatgcttgcttttttctatattgtattcagacaagagatgggaaagatggggaaggagaagggacggtcagtttgaacctacctttcccccgtgcgtacagcctgctggtgggctctgtctgtcggtggagggcagtattaagtgggattggggagagagtgagggaaaggctcctggagattgggagaacctgctggggccagtgagaagactagagggtgtggtgattggtggctacagcaaacactaaggaacccttcattcccacttcccatctgcacctctgctctccccccaaatcaatacactagttgtttccatcccgaaaaaaaaaaaaaaaaaaaaaa

SEQ ID NO: 998 - DNA, 1035 bp, Rattus norvegicus
  Genbank Accession No. NM_021836
atgtgcacgaaaatggaacaggctttctatcacgacgactcttacgcagcggcaggatacggtcggagccctggcagtctttctcttcacgactacaaactcctgaaacccaccttagcgctcaacctggcagatccttatcggggtctcaagggtcctggggcgcggggtccaggcccagagggcagtggggcaggcagctacttttcgggtcagggatcagacacaggcgcatctctgaagctagcctccacggaactggagcgcttgatcgtccccaacagcaacggcgtgatcacgacgacgcccacgcctccgggacagtacttttacccccgtgggggcggcagcggcggaggtacagggggcggcgtcaccgaggagcaggagggctttgcggacggttttgtcaaagccctggacgacctgcagaagatgaaccacgtgacgccccccaacgtgtctctgggcgccagcgggggtccccaggccgggccagggggcgtctatgctggtccggagccgcctccggtctacaccaacctcagcagttactccccagcctctgcaccctctggaggttccgggaccgccgtcgggactgggagctcatacccgacggccaccatcagctacctcccacatgcaccaccctttgcgggcggccacccggcacagctgggcttgagccgtggcgcttccgcctttaaagaggaaccgcagaccgtaccggaggcacgcagccgcgacgccacgccgcctgtgtcccccatcaacatggaagaccaggagcgcatcaaagtggagcgaaagcggctgcggaacaggctggcggccaccaaatgccggaagcggaagctggagcgcatcgcgcgcctggaggacaaggtgaagacactcaaggctgagaacgcggggctgtcaagtgctgccggcctcctacgggagcaagtggcgcagctcaagcagaaggtcatgacccacgtcagcaacggctgccagttgctgctaggggtcaagggacacgccttctga

SEQ ID NO: 999 - DNA, 1902 bp, Rattus norvegicus
  Genbank Accession No. NM_021863
atgtccgcccgcggcccggctatcggcatcgacctgggcaccacttactcgtgcgtgggggtcttccaacatggcaaggtggagatcatcgccaacgaccagggtaaccggaccacccccagctacgtggccttcaccgacaccgagcgccttatcggcgacgccgccaagaaccaagtggccatgaaccccacaaacaccatcttcgacgccaagcggctgatcggacggaagttcgaagacgccacggtgcagtcggatatgaagcactggccgttcagagtggtgagcgaaggtgggaagcccaaagtgcaggtggaatataaaggggagatgaagaccttcttccctgaggagatttcttccatggtcctcactaagatgaaggagatcgccgaagcctacctggggggcaaggtgcagagcgcagtcatcactgttcctgcctatttcaacgactcgcagcgccaggccaccaaggatgcgggcaccatcaccggtctcaatgtattgcgtatcatcaacgaacccacagcagcggccatcgcttatggcctggataagaagggctgcgcgggcggcgagaagaacgtgctcatctttgacctgggcgggggcaccttcgatgtgtccatcctcaccatcgaggatggcatcttcgaggtcaagtccacggccggcgacacccacctgggtggcgaagacttcgacaaccgtatggtcagccacctggcggaggagttcaagcgcaaacacaagaaggacattgggcccaacaagcgcgctgtgcgccggctgcgcaccgcctgcgagcgcgctaagcgcaccctgagctcgtccacgcaggccagcatcgagatcgactcgctgtacgagggcgtggatttctacacgtccatcacccgcgcccgcttcgaggagctcaacgccgatctctttcgagggactctggagccggtggaaaaggcgctgcgcgatgccaagctagacaagggccagatccaggagatagtgctggtgggcggctctacccgcatccctaagatccagaagctcctgcaggatttcttcaacggcaaggagctgaacaagagcatcaatcccgacgaggcggtggcctacggcgccgctgtgcaggcggctatcctcattggcgacaagtctgagaacgtgcaggatctgctgttactcgacgtgactcccttgtcgcttggcattgaaacagctggcggtgtcatgaccccactcataaagagaaacaccaccatccctaccaagcagacgcagaccttcactacctactcagacaaccagagcagcgtgctggtgcaagtgtacgagggcgaacgggccatgaccaaggacaataacctcttgggcaagttcgacctaactgggatccctccagcaccccgcggcgtcccccagatcgaggtcacctttgacatcgatgccaacggcattcttaacgtcactgctgcagacaagagcaccggcaaagaaaataaaatcaccatcaccaacgacaagggtcgtctgagcaaagacgacattgaccggatggtgcaggaggcagacgggtacaaatcggaagatgaagctaatcgcgatcgcgtggcagccaaaaacgcggttgagtcctatacctacaacatcaagcagacggtggaagacgagaaactgaggggcaagattagcgagcaggacaaaaacaagattctcgacaagtgtcaggaggtgatcaactggcttgaccgaaaccagatggcagagaaagatgagtacgaacacaagcagaaagagcttgagagagtgtgcaaccccatcatcagcaaactttaccaaggcggtccaggcggcggcggctcctctggaggacccaccattgaggaagtggactag

SEQ ID NO: 1000 - DNA, 1711 bp, Rattus norvegicus
  Genbank Accession No. NM_022005
agctcacctagaggagggcgcaggcgacagcacagcggtctgcgaggggacccagaagccagtggacgcgggccacccgggagcccagccagtcagccccctctgggaggcgggaaaactgcaagccgcgcccaccgccctgcccccagcgcgccactcccggctgctgggactctgctcagactcctgggatccgcttggagggaacccaacgcctagacaccatggagacggtgctgatcctctgcagcttgctggcccctgtggtcctggctagtgcagctgagaaggagaaagaaaaggatcctttctattatgactaccagaccctgaggattgggggattggtgtttgctgtggtcctcttctctgttgggatacttctcatcctaagtcgcaggtgcaagtgcagtttcaatcagaaacccagggctccaggtgatgaagaggcccaggtggagaaccttatcaccacaaatgctgcggagccccagaaggcagagaactgaagggcagcctccagcatgaagcctccagaagccaaggccagctacccgacactttagaggctgatgtcgaggcttgagaaagccggctacttcataccagacctttccccaggagatgccgaggactcgtgttccctgtgcctctccccaccccctactaaccctagtcttgtattaatgatgtgacactcacagcccttcttctcactgcagccgggctctggaccctttctgtgccgcgtctgtgccgtgtctgtgtgtgtctgctgactgtggtcgttcgtggtcgtttcattgttcctgtgaactgtgtgcttctctcccatgccaccgtcagcaccttgtgccctcctgtgacctccatctactcttgctctctggagtctccccgtccctgaggagcccttagtcccctctttctggatttaggcttgagggagaagttgtaccgagggcaggaagtccccagtgatcccggggctgagaaagttcgtaccctcttcactgatgttccttgtggactctgagaagaaacttgctccagattccaccagtttagaaggtccgtttgcagttggagattcagattgcctcccttgaggcgtctgccctccaggcctcctttttcttttagggtgcccacttaggagtcccaatccgccccaccctttacagaacacccaggaattcttgcctctgaggaatgagctccttacttaacttctgagcaatatccccataggctttggagcccttctgccttcatccaccttccctgcttctgagacttccatctctagcccaattcatctgacagaggactccttccttctctgaagctggtctgtggcaggagatagcccaggggacaggcagcaggcagggtgccggtggctctgtctctctgccacatggtgtggaatctggcagactacagtttctttcccctgcctgtcaggggtcggagtggagagggctggaagggttcaggggcagcgggagagagcaacagggtatgcacacccgtggatgcaaacgcctacgggagtcaaaggtcaccagagtggaaactcacaccagagcctgccccacctgcccattgtgttcccttggaaacgaaccaagccacactgtgtactgggactgctgatctctgtcttgtgatctattatcctctgacaacagaaaagtaaataaatata

SEQ ID NO: 1001 - DNA, 6052 bp, Rattus norvegicus
  Genbank Accession No. NM_022183
aaatgaaactagggaagctctcctaaccgacgcacgtctgtggagaagcgtccaagtcgccggtcgcctagcgtttctcactgattttgtcgcttttaggattctcgagccccttcaggacggtcaccatggagttgtcaccgctgcagcctgtaaatgaaaatatgctactcaacaaaaagaagaatgaagatggcaagaaaagactgtccgttgaaagaatctatcagaaaaaaacccaactggaacatatactgctccgcccagatacctacatcggctctgtggagttagtgacccagcaaatgtgggtttacgatgaagatgttggtattaactacagggaagtcacttttgttcctggtttgtataaaatctttgatgaaattctagttaatgctgctgataacaaacaaagggacccaaaaatgtcttgcattagagtcacaatgatgcgaaataatttaattagtatatggaataatggaaagggaattcctgttgttgaacacaaagtggagaaaatgtatgtcccagctctcatatttggacagctcctgacctccagtaactacgatgatgatgagaagaaagtgacaggtggtcgaaatggctatggagctaaactgtgtaacatattcagcaccaaatttactgtggaaacagccagtagggaatacaagaaaatgttcaaacagacatggatggataacatggggagagctggtgacatggagctcaagccctttagcggagaggattacacgtgtattaccttccagcctgacttatctaagtttaaaatgcaaagcctggacaaagatattgtcgcactgatggtcagaagagcatacgatattgctggttccaccaaagatgtaaaagtctttcttaatggaaacaggctgccagtcaaagggttccgtagttacgtggatatgtatttgaaggataaggttgatgaaactgggaacgctctgaaggtggtgcatgaacaagtaaatccccggtgggaagtgtgcttaacaatgagcgagaaaggctttcagcagattagcttcgtcaacagcatcgctacttctaagggtggcagacatgtcgattatgtagccgatcagattgtgagtaaactcgttgatgtggtgaaaaagaagaacaagggaggtgttgcagtgaaggccgatcaggtgaagaatcacatgtggatttttggaaatgcggtaattgaaaacccaacctttgattctcaaacaaaagaaaacatgactttacaagccaagagctttggatcaacttgtcaattaagtgaaaaattcatcaaagctgcaattggttgtggtattgtcgaaagcatactaaactgggtgaagtttaaggcccaaatccaattaaacaagaagtgttcagctgtaaaacataacaggatcaagggaatccccaaacttgacgacgccaatgacgcagggagccgaaactctgctgaatgcacacttatcctgactgaaggggactcagccaaaactctggcagtctcaggacttggagtggttggaagagacaaatatggggtgttccctctcagaggaaaaatactcaatgtgcgagaagcttctcataaacagatcatggaaaatgctgaaattaacaatatcatcaagattgtggggcttcagtacaagaaaaactatgaggatgaagattcattgaaaactcttcgttatgggaagatcatgattatgacagatcaggaccaagatggttcccacatcaaaggcttgctgatcaattttatccatcacaattggccatctcttctgcgacatcgttttctagaagaatttatcactcctattgtaaaggtatctaaaaacaagcaagaaatagcattctacagtcttcccgagtttgaagaatggaagagtacaaatccaaatcacaaaaaatggaaagtcaagtactacaaaggtttgggcacgagcacatcaaaggaagctaaggagtattttgcaaatatgaaacgacatcgtattcagttcaaatactctggccctgaagacgatgctgcgatcagcctggcctttagtaaaaaacaggtcgatgatcgaaaggaatggttaactaatttcatggaagatagaagacagcggaagttacttggccttcctgaggattatttgtatggacaaaccactatgtacctgacctataatgatttcattaacaaggaacttatcctcttttcaaactctgataatgaaagatctatcccatctatggtagatggtttgaaaccaggtcagagaaaggttttgtttacttgtttcaaacggaatgacaagcgagaggtgaaagttgcccagttagctgggtcagtggcagaaatgtcctcttatcaccatggtgagatgtcgctgatgatgaccattatcaatttggctcagaattttgtgggtagcaataatttgaaccttctacagcctattggtcagtttggtaccaggctgcatggtggcaaggactcagccagccctaggtacatctttacaatgctcagccctttggctcggttgttatttccatcaaaagatgatcacacgttacggtttctgtatgacgacaaccagcgtgttgagcctgaatggtacatccctattatacccatggtgctgataaatggtgctgagggaattggtactgggtggtcctgcaaaatccccaactttgatgttcgtgaagtcgtaaataatatcaggcggctgttggatggagaagagcctctgcccatgctcccaagttataagaattacaaaggtactattgaagaactggcttcaaatcagtatgtgattaatggagaagtagctattctgaattccacaaccattgagatcactgagcttcccatcagaacatggacccagacatataaggaacaggttctagaacctatgttgaatggcaccgagaagacaccccctctaataacagactatagggaataccacacagataccactgtgaagtttgtcataaagatgactgaagaaaaattggcagaggcagagagagtgggactacacaaagtcttcaaactccagactagtctcacttgcaactctatggtactttttgaccatgttggttgtttaaagaaatatgacactgtgttggatattctaagagacttctttgagctcaggcttaaatattatggattaagaaaagaatggcttctaggaatgcttggtgcagaatcttctaaactgaataatcaagctcgctttatattagagaaaatagatggcaaaatagtcattgaaaataaacctaagaaagaattaattaaagttctgattcagagaggctatgactccgaccctgtgaaagcctggaaagaagctcagcagaaggtcccagaagaagaggaaaatgaagagaatgaagagagcgagagtgaaagcacgagccctgcagcggagtctggaccgaccttcaactaccttcttgatatgcccctgtggtatctaaccaaggagaagaaggacgagctgtgcaagcaaagggacgagaaggaacaagagctcaacacgttaaagaaaaagactccatcggatttgtggaaggaagacctggctgcttttgtggaagaactggaggttgttgaagccaaggaaaaacaggatgaacaagtaggacttcctggaaagggggtgaaagcgaaggggaagaaagcgcagatatctgaagtcctgccttctcctgtggggaaaagggtcatcccgcaggtgactatggagatgagagctgaggcagagaagaaaatcaggaggaaaattaagagcgagaatgttgagggcacccctgctgaggatggtgctgagccaggactccggcagagactagagaagaggcagaagagagagccaggtaccagggcaaagaagcaaactacattgccatttaagcctatcaaaaaagcccaaaagcaaaacccttggtctgattctgaatcagatatgagcagcaacgaaagcaattttgatgtccctccacgagagaaagagccaagaattgctgcaacaaaagccaaattcacggcggatttagactctgatgacgatttctcaggcttggatgagaaggatgaggatgaagatttcttcccattagatgatactccacctaagaccaaaatgcccccaaaaaatactaaaaaagcactgaagccacagaagagctccacatcagttgatcttgaaagtgatgggaaagacagtgtaccagcttctccaggcgcttctgctgctgacgtcccagctgagactgaaccctccaagccgtcctccaaacagacagtgggagtgaagaggacaataaccaaaggtcagtctttaacctccactgctggcaccaaaaagagagctgtaccaaaggagaccaagtcagattcagccttgaatgctcatgtctccaaaaagcctgctcctgccaaagccaagaacagtcgcaagaggatgccatcttcttctgacagctcggactctgagtttgagaaggcgatttctaaaggtgccacaagcaagaaactcaagggagaggagcgggatttccatgtggacttagatgacactgtggctcctcgagcaaaatccggacgagcaaggaagccgattaagtacctggaggagtcggatgacgacctcttctaaggggtgaggggatttcaggaatggttttactgagccacgttagttttaaagttcttccttaaccactctgaatttaattggcaggaagacttttttttaaataagaatatgcaagtgagcaggcccctgtggccttcacctttgttctcaacatactgtcagtagtggccgtctcgtgggcattgtcgtcttctctgattgtctgttttatgtctgttttctttggtctctgaaacctggcttgaatattttttggattccacataattatatgcttactcagcacagtagcatttatcaatttaaactaaagtggaaatggtttcaaaagcattcctgcctcctttcctatcccactaaatatgaggtaagacagcccttgttttcaattttataggtagaattccggccgggatcccccggcctgcctctgacggcggggactcagcttcggagagtcgggaggcatcaggtggcccgcagctctcgtcctctgcgtccttctcgcggtggctgaccgcgactccgaagaggtggctggccgctgcgcttggcggggtggggcgggatggcggcgtctgatggctggaggcggcctggccgggtactcttctacccgactctgctctacacagtgttcctggggagggtaggcagcccgaccaccgcgattggtaccaccgcatcgaccacacagtgctgctgggcgcagtgccgctgaggagcatgacgcgccggctggtactggacgagacgtgcgacggagtgatcactatgaacgaggagtacgagaccagattcctgtgcaacacctcgaaggaatggaagaatgtgggagttgagcagctacggctcagcacagtcgacatgactggagtccccaccttggccaacctccacagaggagtccagtttgctctcaagtaccagtccctgggccagtgtgtctacgtgcattgtaaggctggtcgatccagaagtgccacaatggtcgaggcctatctgattcaggtacacaactggagcccagaggaggctatagaagctatcgccaaaatccggtcacacatctccatcaggcccagccagttggaaattctcaaagagttccagaaggagattcgtgcaagggcagcaaataactaactactggtctcttgtgctgacatgagtatgaagtctgtggatgacaaagaacttggctctccgagatacagtaacatgttaaaggacaaagcgcttaagctaccaccactgcaaatgtgctgagtataatgtccctcctttgccttccttcctgaaataacacttggatggccacagagaaaaaaaaaaaaaaaaaa

SEQ ID NO: 1002 - DNA, 1617 bp, Rattus norvegicus
  Genbank Accession No. NM_022298
gcgctgtaagaagcaacacctcctcctcgcctccgccatccacccggcagccgcgaagcagcaaccatgcgtgagtgtatctccatccacgtcggccaggctggtgtccagatcggcaatgcctgctgggagctctactgcctggaacatggcatccagcctgatggccagatgccaagcgacaagaccattgggggaggagatgactccttcaacaccttcttcagtgagacaggagctggcaagcacgtgccccgggcggtgttcgtagacctggaacccacagttattgatgaagttcgcactggcacctaccgccagctcttccacccagagcagctcatcacaggcaaggaagatgctgccaataactatgcccgtggccactacaccattggcaaggagatcattgaccttgtcttggacagaattcgcaagctggctgaccagtgcacgggtctccagggcttcttggttttccacagctttggtgggggaactggctctgggttcacctccctgctgatggagaggctctctgtcgactacggaaagaagtccaagctggagttctccatttacccagccccccaggtttccactgctgtggttgagccctacaattccatcctcaccacccacaccaccctggagcactctgattgtgccttcatggtagacaatgaggccatctatgacatctgtcgtagaaacctcgacattgagcgcccaacctacactaacttaaacaggttgataggtcaaattgtgtcttccatcactgcttccctcagatttgatggggccctgaatgttgatctgacagaattccagaccaacctggtgccctaccctcgcatccacttccctctggccacttatgcccctgtcatctctgctgagaaagcctaccatgaacagctttctgtagcagagatcaccaatgcctgctttgagccagccaaccagatggtgaaatgtgaccctcgccatggtaaatacatggcttgctgcctgctgtaccgtggtgatgtggtccccaaagatgtcaatgctgccattgccaccatcaagaccaagcgtaccatccagtttgtggactggtgccccactggcttcaaggttggcattaattaccagcctcccactgtggtccctggtggcgacctggccaaggtccagagagctgtgtgtatgctgagcaacaccacagccattgctgaggcctgggctcgcctggatcacaagtttgatctgatgtatgccaagcgtgcctttgtgcactggtacgtgggtgagggcatggaggagggagagttctctgaggcccgtgaggacatggctgccctagagaaggattatgaggaggttggtgtggattctgtggagggtgagggtgaggaagaaggagaggaatactaaattaaatgtcacaaggtgctgctttcacagggatgtttattctggtccaacatagaaagttgtgggctgatcagttaatttgtatgtggcaatgtgtgctttcatacagttactgactttaagtgtgaatgatttgtcagagacccgagccgtccacttcactgatgggttttaaataaaatactccctgtctta

SEQ ID NO: 1003 - DNA, 1024 bp, Rattus norvegicus
  Genbank Accession No. NM_022300
gggggctgcagcggcggcggcagtagcggcagcggcggcggcggcggcggcagcgctccaactcgctccacgctccggctccgccgtcgagccgggagagagagagcctttgctgagcggccaggcactcggccggacgacaccagacacccgggccccttggaggcaccgcgctcacccagggccggcacagcgacccaaagccgaactccaagatgggaagcaagctgagcaagaagaagaagggctacaatgtgaacgacgagaaggccaaggacaaagacaagaaggctgaaggcgcgggcaccgaggaggaggggacccagaaggagagcgaaccccaggcggccgccgacgccaccgaggtcaaggagagcgcggaggagaagcccaaggacgcggcggacggcgaggccaaggcggaggaaaaggaggccgacaaggcggcggccaaggaggaggcgcccaaggccgagcccgagaagagcgagggcgccgcggaggagcagcccgagcccgcgccggcgcccgagcaggaggcggccgcgcccgggcccgctgcgggcggcgaggcccccaaggccggcgaggcgagcgcggagagcacgggcgcggccgacggcgcgccccaggaggagggcgaggccaaaaagactgaggctcccgccgccggccccgaagcgaaaagcgacgcggccccggcggcttcagactctaaacctagcacggagcccgcgccctcgtccaaggagacgcccgcggcctccgaggcgcccagttccgccgccaaggcccccgcgcccgccgcgcctgccgccgagccccaggccgaggcacccgtcgccagctccgagcaaagcgtggccgtcaaagagtaaccgggacagcctagccagaaccgacgccactcgcaaacgacctgtctcacgctctctctgtctctcactctgtcctctctctgtctctctatcctatactaacttgtttcaaattggaagtgaggatatgtattgcccaagggatt

SEQ ID NO: 1004 - DNA, 1160 bp, Rattus norvegicus
  Genbank Accession No. NM_022381
ttgtcagcaagacctcgctccccttacagtaactctcatctagacgtcgcaactccgccaccatgtttgaggcacgcctgatccagggctccatcctgaagaaggtgctggaggccctcaaagacctcatcaatgaggcctgctgggacatcagttcgggcggcgtgaacctacagagcatggattcgtctcacgtctccttagtgcagcttactctgcgctccgaaggcttcgacacataccgctgcgatcgcaacctggccatgggcgtgaacctcaccagcatgtccaaaattctaaaatgtgctggtaatgaagacatcattacattaagggctgaagataatgctgataccttagcactagtatttgaagcaccaaatcaagagaaagtttcagactatgagatgaagttaatggacttagacgttgagcaacttggaatcccagaacaggagtacagctgcgtagtaaagatgccatctggtgaatttgcacgtatatgccgggaccttagccatattggagatgctgtggtgatctcctgtgcaaaggacggggtgaagttttctgcgagtggggagcttggcaatgggaacattaagttgtcccagacaagcaatgttgataaagaagaggaagctgtgtccatagagatgaatgagccagttcagctaacttttgctctgaggtacctgaactttttcacaaaagccactccactgtctcctacagtaacactcagtatgtctgcagatgtaccccttgttgtagagtataaaattgctgacatgggacacttaaagtattatttggctcccaagatcgaagatgaagaaggatcttaggcgttgctagaaattgagaaactaaacctttgacgatcgcttctgagatgccagcgtgttctgaggtcttttctgtcaccaagtttgtacctgagtattcttaaatattaaaataaaatgtagatatcttctgtaaataaccttttttttcctctccataatttgcttacagaataagctccaaagtaaaaactggttttgttaacataaatgtctctgccttacaaatactggtgattttcataaatgatcttgacgctaaatgcagttttaagaaatatttttcaatttaaataaagttaactgaatttg

SEQ ID NO: 1005 - DNA, 2410 bp, Rattus norvegicus
  Genbank Accession No. NM_022392
tacgctgctttggtggcgtgcacctctcacggtgtgcctagccgccgatgcccaggctgcacgatcacgtctggagctacccaagcgcgggcgctgcgaggccgtacagcctcccgcgaggcatgattgcggcggccctctgtccgcagggccccggagcccccgagcccgagcccgcgccccggggccagcgagagggaaccgcaggcttcagcgcacgacccggcagctggcaccacgacctggtgcagcggagcctcgtgctcttctcatttggcgtggtcctggctctggtgctcaacctgctgcagatccagcggaatgtcacgctcttcccggacgaggtgatagccaccatcttctcctccgcctggtgggtgcccccgtgctgtggcacggcagccgctgttgtcggcttattgtatccctgtattgacagtcacctgggagaaccacacaagttcaagagagagtgggccagtgtcatgcgatgtatcgcggtgtttgttggcatcaaccatgccagtgccaaattagatttcgccaataatgtgcagctgtccctgactctggcagccctatccttgggcttgtggtggacgtttgatcgatcccgaagtggcctggggctcgggatcaccatcgccttcctagccacgctgatcactcagtttcttgtttataatggcgtctaccagtacacgtccccagatttcctctatatccgttcttggctcccttgtatatttttctcaggaggtgtcacagtgggaaacataggacgacagttagctatgggtgttccagaaaagcctcacagtgactgagtttgagcacatgattcagggcggaagcagaatgtggagacactggtcctgggtgtggtgaagaggatctttttctcaatgttccatttagactgggctgatgataaatgactcctaaagatgcgttcacgtagtctaaatagcaagtggaggcaaggactacttacctaaagtcttaccttgctcacccaccctcacacctgtctgcactggaacattctatcccaggctgtatgtgagagttgggtaagggggccggtttcccgagtattagatttcactcatcattcaaagcaaaatgccatatttcaaagccttgaatcaaaatgaattaccaactagcagttttatatcagtgcccaaaggagagaggttgatggtgcttaacagagatgaagtatgtgcagtaagaatatttatccagaattaaaatatagggttgtgtaaagaggggctaagggcagcagtaagttggaggaagatcatgctccccggaggacccagtgcagccacatctccaggtctcgctcaggctggcgctcacacgtgggtctcatcagtgtgggaactatgctgtttactgacaggaggcttgtagacaatcttactgacagcccaggacaacacaaagtcaggattctgcattgcgatgctggacttttcatctcaatttaagtgaagttttatccaagatctggagcatctaagagtgaatagctgtctgctgtttcagtcgtaatgagccgaaattgtgtctctgtcactccagagtggagaggacttttccacagccctatggagcttgcaatctgtgattgccttgtaaaaggttgagtgtgcacgtcactgcgttcggtgcgcagtgtcctgtgtgtgttggacagcgtagaacacatgggaccttgcaagtattgggtcttcaacttcaagtgcaatgtgtatgaaaccaatctgagccttgtattctcttaaatatttattatttttttttaaccgcgcgagctgttctggagaagggttctcgggtcatttcagagctgtgtgaggcacactcagcaatactgtgtcagccgtgacgctccccagtcacaccctccactacaccctagtcctttgacatactccaggtttgtaagtttagtgatttttacttacaaatttacccttttttgcattctaaaattgtgtttaaattatatggaagtacttggtgtaggcagtcattggtccccgggcagcagaagctctgcctgtggaatcgggtttgggttcactctgcagggctcctcatagaggctttgcttatttgttttgaggaaaatgtctggagtaaacctttgttttctgaaactactttagctaaaagaaaatgggtgttctagactttggaatggttcttaaagtttcctggaaataaaaataatgattggcacttcaaagacattctttagccaagacttcagtgtctagcagaaaccacaagtgactagaagagcaagtgatcttggtgatgcacttgattgtatacaatgagtattttttctcttaaactggaaataaatctgttagaaataatatagcca

SEQ ID NO: 1006 - DNA, 1548 bp, Rattus norvegicus
  Genbank Accession No. NM_022400
cgggatcatgtctgcagctatactaggacaggtctggacccggaagcttctgcctattccctggcgtctatgtgtgcccggaagatgtgtgtcctccaacttcaaggcggcagacctccaggttcaggtgaccagagagccacagaagaagccagcccctagccagcctctgctgtttgggaagacattcacggaccacatgctgatggtggagtggaacagcaagacaggctggggccctccaaggatccagcccttccagaacctcacactgcacccagcctgctccggcctgcactactcattgcagctctttgaaggcttgaaagcttataaaggcagagacaagcaggtacgcctcttccggccctggctcaacatggacaggatgctacgttctgcaaggcgcctctgcctgccagactttgacaagcaggaactgctggagtgcatccgccagctcattgaagtagacaaagactgggttcccgatggcaatggaacaagcctctatgtgcggccggtgcttattggaaatgagccctccctgggtgttggaatggtcacacaagccctcctgttcgtcattctgtgccctgtgggctcctacttccccggagactccatgacacctgtctccctcctggcggacccctcattcgtcagagcctggattggtggggtcggtgactgcaagttgggggggaattacggccccactgtggctgtgcaacaagaagcccagaagaaaggctgcgagcaggtcctctggctgtacgggccggaccaccagctcaccgaggtgggaaccatgaacatctttgtctactggactcatgaagacggagaactggagctggcaacccccccactggatggcatcatcctccccggagtggttcgacaaagcctgctggatctggccaggacttggggtgagttccgggtggcagaacgcaaggtcactatgaaggaattgaagcgggcactggaggagggccgggtgcgagaagtcttcggctcaggcactgcttgtcaggtctgcccagtgcaccaaatcctatatgaaggcaagcaactccacattcctaccatggaaaatgggccggaactcatcctgcgcttccagaaggagttgaaggctattcagtacggaaccagtgcccacgattggatgcttcgtgtgtgacgttagggaggttgtgccctacctggttggatccgctgacgtgcagcatccagttcagcgtcctcgcctcccagagactcaagagaagtgcaatagggaaggtcgttccagactgctggctctctggcaccctcacgtggaagttacactccaaagccttaagggcggacccatgtaatttggaccccacctcagttcagctcgtccgcgtcctggtgttcaagagagaaccttggcttcttctcgatctccgttctcaggcggatccccggtgctcttcatgtctttttttttttttttttccgtctctctctccttgctgcaattttgaaataaaaatgccaaagaacaagaaaaaa

SEQ ID NO: 1007 - DNA, 15231 bp, Rattus norvegicus
  Genbank Accession No. NM_022401
atggtggctggcatgctcatgccactggaccagcttcgggccatctatgaggtgctctttcgtgagggggtgatggttgccaagaaggaccggcgaccccgaagcctgcatccccatgtgcccggcgtcaccaatctacaggtcatgcgtgccatgacctcgctgaaagctcggggcctggtgcgggagacctttgcctggtgccacttctactggtacctgaccaacgagggcatcgaccacctacgccagtacctacacctgccaccggagatcgtacctgcctctctgcagcgtgtgcgccgccctgttgccatggtgatgcctgcacgtcgtcgctccccccatgtgcagaccatgcaaggtcccttaggctgtccaccaaagaggggccctctgccagctgaggaccctgcccgggaggagcggcaggtctatcgcaggaaggagcgtgaggaaggggcacctgaaacccctgtggtgtctgccaccatcgtggggaccctggccaggcccggcccagagcccaccccagccacagatgaacgagaccgtgtgcagaagaaaacttccaccaagtgggtcaataaacaccttatcaaggctcaaaggcacatcagtgacctgtatgaagacctccgtgatggccacaacctcatctccctgctggaagtcctctcaggagacagcctgccccgagagaaggggaggatgcgtttccacaagctgcaaaacgttcagattgccctggactatctccgacatcggcaggtgaagttggtgaacatcagaaatgatgacatcgccgatggcaaccccaagctgaccctgggcctgatctggacaatcatcctgcacttcaagatctcagacattcaggtgagcggccagtccgaggacatgacagccaaggagaagctgctgctgtggtctcagcgtatggtagagggctaccaaggcctgcgctgtgacaacttcaccaccagctggcgcgacggccggctcttcaatgctatcatccacaggcacaagcccatgctcatagacatgaataaagtgtaccgacagaccaacctggagaacctagaccaggccttctccgtggcagagcgggacctgggagttaccaggctcctggacccagaagatgtggatgtccctcagcctgatgagaagtccatcatcacctacgtttcatccctgtatgatgccatgccccgtgtgccgggcgcacaggatggagtgagggccaatgagctgcagcttcgttggcaagagtaccgggagcttgtgctgctgctgctacagtggatccggcaccacaccgctgcttttgaggagcgcaagttcccctccagctttgaggagattgagatcctatggtgccagtttctgaagttcaaggagacagaacttcctgccaaggaggcagacaagaaccggtccaaaggcatctaccagtctttggagggagcagtacaagcaggccagctcaagattccccctggctaccacccgctagacgtggaaaaggagtggggcaagctgcacgtggccatcctggagcgggagaagcaactccggagcgagtttgagaggctggagtgtcttcagcgcattgtgagcaagctacagatggaggctgggctatgtgaggagcagctgtaccaggcggattccctactgcagtcggatattcggctgctggcctcaggcaaggcggcacagcgggctggggaagtggagagagacctggacaaggctgatggtatgatccggctgttgttcaatgatgtgcagacccttaaagatgggcggcatccacagggtgaacagatgtaccggagggtgtatcgtctgcatgagcgcctggtagccatccgcactgaatacaacctccggctgaaggcaggggtgggtgcccctgtgacccaggtgaccctgcagagcacacagaggcgcccagagctagaggactccacactgcgttacctgcacgacctgctggcatgggtggaggagaaccagcgtcgaatagacggtgctgagtggggcgtggacttgcccagtgtagaggcacagctgggcagccaccgaggcatgcatcagtctattgaggaattccgggccaagatcgagcgggctcggaatgatgagagccagctctcccctgccacccgaggtgcctaccgagactgcctgggccgcctggacctgcagtatgcaaagctgctgaactcctccaaggcccgcctccggtccctggagagcttgcatgggtttgtggcggcagctaccaaggagctgatgtggctgaatgagaaggaagaggaagaagtgggctttgattggagtgaccgcaacaccaacatggctgccaagaaagaaagttactcggccctgatgcgtgagctggagatgaaggaaaagaaaattaaggagatccagaacacgggggacaggttgctgcgggaagaccatcctgcccggcccacagtggagtccttccaggctgccctgcagacacagtggagctggatgctgcagctgtgttgctgcattgaagcgcacttgaaagagaacacagcctacttccagttcttctcagatgttcgggaggctgaggaacagttgcagaaactacaggagacgttacgcaggaagtacagctgtgaccgctccatcactgtcacaaggcttgaggacctgctgcaggatgcccaggatgagaaggagcaactgaatgagtacaaagggcacctctcaggcctggccaagcgggccaaggctattgtgcagctgaagccacgcaaccctgcccaccctgtgcggggtcacgtgcccctgctagctgtgtgtgactacaagcaggtggaggtgactgtgcacaagggtgaccaatgccagctggtgggccctgcacagccgttccactggaaggtgctcagtagttccggcagtgaggctgccgtgccttctgtgtgctttcttgtgccgccacccaaccaggaggcccaggaagctgttgctaggctggaggcccagcatcaggccctggttactctgtggcaccagcttcacgtggacatgaagagtcttctggcatggcagagcctcaatcgtgacatacagctcatccggtcctggtccctagtcacgttccgcacgctgaagcccgaggagcagcggcaagctctgcgcaacctggagttgcactaccaggccttccttcgagacagccaggacgctggtggctttgggcccgaggaccggctggtggcagagcgcgaatatggatcttgtagtcgccactaccagcagctgctacaaagcctggagcagggtgagcaggaagagtctcgctgtcagcgatgcatctcggagctcaaggacattcggctgcaactggaggcctgtgagactcggactgtgcaccgtctgcggctgccactggataaagaccccgcacgggagtgtgcccagcgcatcgctgagcaacagaaagcacaggctgaggtggaggggctgggcaagggagttgcccggctgtctgctgaggctgagaaagttctggccttgccagagccgtcacctgctgcaccaactctgcgctcggagttggaattgaccctgggcaagctggaacaggtcagaagcctgtctgccatctacttggagaaactcaagaccatcagcttggtaattcgcagtacccagggggctgaggaggtgcttaaaacacacgaggagcacctgaaggaggcccaggccgtgcctgccacactccaagagctcgaagtcaccaaggcttcactaaagaagctgcgggcccaggcggaggcacagcagcctgtattcaacaccctacgagatgagctgaggggggcacaggaagttggtgaacggctacagcagcggcatggtgagcgggacgtggaagtagagcgctggcgagaacgtgtcactcagttgctggagcgctggcaggctgtgctagcccagactgatgtgcggcagcgggagcttgaacagctgggccgccaacttcgctactaccgtgaaagtgcggatccgctgagctcctggctgcaggatgccaagagccggcaagaacagatccaggctgtgccaatagccaacagtcaggctgcacgagaacagctgcgccaggagaaggccctgctggaggagattgagcgccatggtgagaaggttgaggagtgccagaagtttgctaagcagtacatcaatgcaatcaaggactatgagctccagctgatcacctacaaggctcagcttgaacctgtggcctcccccgccaagaagcccaaggttcagtctggatcggagagcgtcatccaggagtacgtggatctgcgtacacgctacagtgagctgaccacactcacgagtcagtacatcaagttcatcagtgagacactgcgccgcatggaagaggaagagcggctggctgagcaacagcgggcagaggagcgggagcgcctggccgaggtggaggccgcgctggagaagcagcggcagctggctgaggcccatgcccaggccaaggcacaggccgagctggaggcacgagaactgcagcggcgcatgcaggaggaggtgacgcggcgcgaggaggcggcggtggacgcacagcaacagaagcgcagcatccaagaggagctgcagcatctgcggcaaagctcagaggcagagatccaggccaaggcccagcaggtggaggctgcagagcgcagccgcatgcgcattgaggaagagatccgcgtagtccgtctgcagctagagacaactgagcgtcagcgtggaggggcggaggatgagctgcaggctctgcgtgcacgggctgaggaggcagaagcacagaagcggcaggctcaggaggaagccgagcgcttgcggaggcaggtgcaggatgagagccaacgcaaacggcaggcggaggccgagctggccctgcgtgtgaaggcagaagcggaggcagcgcgagagaagcagcgggccctgcaggctctggatgaactgaaactgcaggccgaggaggccgaacggtggctgtgccaagccgaggcagagagggctcgccaagtgcaggtagccctggagacagcgcagcgtagtgcagaagtggagctgcagagcaagcgtccgtcctttgcagagaagaccgcacagttggagcgcacgctgcaggaagagcacgtgacagtgacacagctgcgggaggaggcggaacggcgggcacagcagcaggctgaagccgagcgagcccgtgaggaagccgagcgggagctggagcgctggcagctgaaggccaatgaggcgctgcggctgcggctgcaggcagaggaggtggcacagcagaagagcctggcccaggccgatgcggagaagcagaaggaagaggcagaacgggaagcccggcggcggggcaaggcagaggagcaggccgtgcggcagcgagagctggctgagcaggagctggagaagcagcggcagctgacagagggcaccgcccagcagcgcctggctgccgagcaggagctgattcgcctgcgggcagagacggagcaaggtgagcatcagcggcagctgctggaggaagagctggcccggctacagcacgaagcgacagcagccacacagaagcgccaggagctggaggctgagctggcgaaggttcgggcagagatggaggtactgctggccagcaaggcacgagccgaagaggagtctcgctccaccagtgaaaagtccaagcagaggctggaagctgaggcagggcggtttcgagagctggctgaggaggctgcccgcctgcgtgctctggccgaggaggcaaggcggcaccgggagttggccgaggaggacgcggcacgccagcgggccgaggcggacggagtgcttacggagaagctggctgccatcagtgaggccacaaggctcaagacggaggcagagattgcactcaaagagaaggaggccgagaacgagcgcctgaggcgcctggctgaagatgaggccttccagcggcgccggctggaggagcaggcagcacagcacaaggcagacatagaggagcgcctggcccagctgcgcaaggcatccgagagcgagctggagcgacagaaggggttggtggaggataccctgcggcagcggcggcaggtggaggaggagatcatggctctgaaggcgagcttcgagaaggccgcggctggcaaggcagaactggagctggagcttggccgcatccgcagcaatgccgaggacaccatgcgcagcaaggagctggccgagcaggaggcagcgcggcagcggcagttggcagctgaggaggagcagaggcgccgggaagccgaggagcgggtgcagaggagcctggcagcggaggaggaagccgcacggcagcgcaaggtcgcactggaggaagtcgagcggctcaaggccaaggttgaggaagcgcggcgcctgcgagagcgagctgagcaggagtctgcgaggcagctgcagctggcccaggaggctgcccagaaacggctgcaggcggaggagaaggcgcacgcctttgtggtgcagcagcgagaagaggagctgcagcagactcttcagcaagagcagaacatgctggagcggctgcggagcgaggcagaggcagcgcggcgagctgctgaggaggcggaggaggcccgggagcaggcagaacgtgaggcagcgcagtctaggaagcaagtggaagaggccgagcggctgaagcagtcggcagaggagcaggctcaggcccaggcccaggcgcaggcggctgcagagaaactgcgcaaggaagcggagcaggaggcggcgcgtcgggcccaggcggagcaggctgcgttgaaacagaagcaggcagccgacgcggagatggagaagcacaagaagtttgcagagcagacgctacggcagaaggctcaggtagagcaggagctgaccacgctgaggctgcagctcgaggagaccgaccaccagaagagcatcctggatgaggagctgcagcggctaaaggctgaggtaacagaggcagcccggcagcgtagccaggtagaggaggagctcttctctgtccgcgtgcagatggaggagctgggcaaactcaaggctcgcattgaagctgaaaaccgggcactcatccttcgtgacaaggacaacacacagcgcttcctggaggaggaggccgagaagatgaaacaggtggcagaggaagctgcacggttgagcgtagctgcccaggaggcagcaaggctgcggcagctagccgaggaggacctggcccagcagcgggccctggcggagaagatgctgaaggagaagatgcaggcggtgcaggaagccacaaggctcaaggctgaggctgagctgctgcagcagcagaaggagctggcacaggagcaggcccggcggctgcaggcggacaaggagcaaatggctcagcagttggtagaggagacacagggtttccagcggaccctggaggctgagcggcagcggcagctagaaatgagcgcagaggctgaacgcctcaagttgcgcatggctgagatgagccgggctcaggcccgtgcagaggaggatgcccagcgcttccggaagcaggctgaagagatcggcgaaaagctgcaccgcactgaactcgctacacaggagaaggtgacattggtgcagactctcgagatccagcgacagcagagtgaccaagatgccgagcgtctgagggaggccattgctgagctggagcgtgagaaggagaagctcaagcaggaggcgaagttactgcagctcaagtctgaggagatgcagactgtgcagcaggagcagatactgcaggagacacaggccctgcagaagagctttctctctgagaaggacagcttgctgcaacgcgaacgcttcatcgagcaggagaaggccaagctggagcagcttttccaggacgaggtggcaaaagcaaaacagctgcaggaggagcagcagcggcagcagcagcagatggagcaggaaaagcaggagctggtggccagcatggaggaggcccggaggcggcagcgtgaggcagaggagggtgtgaggcgcaagcaagaggaactgcagcgtctggagcagcagcggcagcagcaggagaaactactggcagaggagaaccagaggctgcgggagcggctgcagcgcctggaggaagagcaccgagctgcgttggcgcactctgaggagatcgccacctcccaggctgctgccacaaaagcactgcccaatggccgcgacgcacttgatggcccctccatggaggccgagcccgagtacacctttgagggattacgtcagaaggtgccagctcagcagctacaggaagcaggcattctgagcatggaggaactgcagcgtttgacacagggtcacaccacggtggctgagctcacgcagcgggaagatgtgcgccactacctgaagggcggcagcagcatcgcaggattgctcctgaagcccaccaatgagaaactgagtgtctacacagccctacagcggcagctgctcagccctggaacagcccttatcttacttgaggcccaggcagcctcgggcttcctgctggaccctgtccggaaccggcggctgacggtcaatgaggctgtgaaggagggtgtggtgggtcccgagctgcaccacaagctgctgtcagctgagcgtgccgtcactggctacaaggacccttacacaggagaacagatctctctcttccaggccatgaagaaggacctcattgtcagggaccatggcatccgcctgctggaagcccagatcgccacaggtggcatcattgaccctgtacacagccaccgtgttcccgtggacgtggcctaccagcgtggctacttcgatgaggagatgaaccgtgtgctggctgacccaagcgatgacaccaagggcttctttgaccccaacactcacgagaacctcacgtacctgcagctgctggagcgctgtgtggaggaccccgagacaggcctgcgcctcctgccactcacagacaaggctgccaagggtggtgagctggtgtacactgacacggaggcccgtgacgtcttcgaaaaggccacagtgtctgcaccattcggcaagttccagggcaagaccgtgaccatctgggagatcatcaactcagagtacttcacagcggagcagcgacgggacctgctccggcagttccgcacgggccgcatcacggtggagaagatcatcaagattgtcatcacggtggtagaggaacacgagcggaagggccagctctgctttgagggcctccgtgcccttgtgcctgctgcagagctgctggacagtggagtcatcagtcatgaagtctaccagcagctgcagcggggtgagcgctctgtgcgggaagtggccgaggcagacgaggtgaggcaggccctgcggggtaccagtgtcattgccggtgtgtggctggaagaagcagggcagaagctgagcatctatgaggccctgaggagagatttgctgcagccagaggtggctgtggccttgctggaggcccaggctggcactgggcacatcattgaccctgccacgagtgccaggctgactgtggatgaggcagtgcgtgctggcctggtgggtcctgagatgcacgagaagctcttgtcagctgagaaggctgtaacaggctatagggatccctactcgggacagagcgtctcgctcttccaggctctgaagaagggtctcatcccccgagaacagggcctgcgcctgctggatgcccagttatccactggtggcattgtagaccccagcaaaagccaccgtgtgcccctggatgttgcctatgcccggggctacctggacaaagagactaacagggccctgacgtcacccagagacgatgccagagtctaccttgaccccagcacccgggagccagtcacctacagccagctccaacagcggtgccggtctgaccagctgactgggttgagcctactgcccctctcagagaaggccgtccgggcccggcaggaagaggtctactctgagctccaggcccgtgagacattggagaaggccaaggtggaggttcctgtgggcggctttaagggcagggcgctgacagtgtgggagctcataagctcggaatacttcactgaggagcagcggcaggagctgctacggcagttccgcacaggcaaggtcactgtagagaaggtcatcaagattcttatcaccattgtggaggaggtggagactcaacggcaggagagactgtccttcagtggcctccgtgcccctgtgccggccagtgagctcctggcctccaagatcctcagcagaactcagtttgagcagctcaaggatggcaagacatcagtcaaagatctgtcagaggtgggctctgtgcggacactgctgcaaggcagcggctgcctggctggcatctatctggaggactcgaaggagaaagtaaccatctatgaggccatgcgccggggcctcctcagagccagcacagccacactcctgctggaggcccaggcggccactggttttctagtggaccctgtgcggaaccaacgtctgtacgtccatgaagctgtcaaggctggagtggtgggcccggagctccatgagaagctgctgtcggctgagaaggcggtcactggttacaaagatccctactctggcagcaccatctcgctgttccaggccatgaagaagggcttggtcctcagggaccatgccatccgcctgctggaggcccagattgccacaggtggcatcattgaccctgtgcacagtcaccgccttcccgtagatgttgcctaccagcgtggctacttcgatgaggagatgaaccgtgtgctggctgacccaagtgatgacaccaagggcttcttcgaccccaacacccacgagaacctcacgtacctgcagctgctggagcgctgcgtggaggaccccgagacaggcctgcgcctcctgccactcagaggggcagagaagacagaggtggtagaaaccacacaggtgtatactgaggaggagactcggagggcgttcgaggagacgcagattgacatcccaggtggtggcagccacggtggctcctccatgtctctatgggaggtgatgcagtcagacatgatcccagaggaccagcgtgcccggctcatggccgactttcaggctggcagagtgaccaaggagcgcatgatcattatcatcatcgaaatcattgagaagacggagatcatccgccagcagaacctcgcctcctatgactacgtacgccgccgcctcaccgccgaagacctgtatgaggcccggatcatctcccttgagacctacaacctcttccgggaaggcaccaagagcctccgtgaggttctggagatggaatctgcctggcgctacctttacggcacaggatcggtggccggtgtctacctgcctggctctaggcagacgctaaccatctaccaggcccttaagaaggggctgctgagtgccgaggtggcccgcttgctgctggaagcacaggcagccacaggctttctgctggacccagtgaaaggcgagaggctgactgtggacgaggccgtgcggaagggtctggtaggccccgagctgcacgatcggctcctctctgccgagcgagctgtaactggctaccgagacccctacaccgaacagcccatctcactcttccaggccatgaagaaggagctgatccctgccgaggaggcactgaggctgctggatgctcagctagccacaggaggcattgtggacccccgcctgggtttccacctccccctggaggtggcttaccaacgaggctacctcaataaggacacgcatgaccagttgtcagagcccagtgaggtgcgcagctatgtggacccctccacggatgagcgtctcagctacacacagctgctcaagcgttgccgccgtgacgacaacagcggccagatgctgctgccgctctctgatgcccgcaagctgaccttccgcggcctgcgcaagcagatcaccgtggaggagctggtacgctctcaggtcatggatgaggccacagcactgcagctgcaagaaggcctgacctccattgaggaggtcactaagaacctgcagaagttccttgagggtaccagctgcattgctggagtctttgttgatgctaccaaggaacggctgtcggtgtaccaggccatgaagaagggcatcatccgtcccgggacagccttcgagctcctggaagcgcaggcagccaccggctacgtcattgaccctatcaaggggctcaagctgactgtggaagaggccgtgcgcatgggtatcgtgggccccgagttcaaggacaagctgctgtctgctgagcgtgccgtcactggctacaaggacccttactctgggaaactcatctctctcttccaggccatgaagaagggcctgatcctgaaggaccatggcatccgcctgctagaggctcagatcgccaccggtggcatcattgaccctgaggagagccaccgcctgcctgtggaagtggcctataagcgtggtctctttgatgaggagatgaacgagatcctgactgacccctcagatgacaccaagggcttcttcgacccaaacaccgaggagaacctcacatacctgcagctgatggagcgctgtatcactgacccccagactggcctgtgtctcctgccgctgaaggaaaagaagcgggagcggaagacgtcctccaagtcctcagtgcgcaagcgccgcgtggtgattgtggaccctgagacgggcaaggagatgtcagtgtatgaggcctaccgcaagggcctcatagaccaccagacatacctggagttgtcagagcaggagtgcgagtgggaagaaatcaccatctcttcctcggacggcgtcgtcaaatctatgatcatcgaccgccgctctggccgccagtatgacattggtgacgccatcaccaagaacctcattgaccgctcagcactggaccagtaccgcgctggcacactttctatcaccgagtttgccgacatgctctcaggcaacgctggtggcttccgctcccgctcctcctctgtgggctcatcttcctcctaccccatcagttctgctgtccctaggacccagctagcctcctggtctgatcctactgaggagactggcccagtggccggcatcctagacacagagactctggagaaggtgtccatcacagaggccatgcaccgcaacctggtagacaacatcactggccagcggttgctggaggcacaggcctgcaccgggggcatcattgaccccagcactggtgagcgcttcccggtcactgaggctgtcaacaagggcctggtggacaagatcatggtagaccgtatcaatctggcccagaaggccttctgtgggtttgaggacccacgcaccaagaccaagatgtcagctgcccaggccctgaagaagggctggctttactacgaggcaggccagcgtttcctcgaggtgcagtacctgacgggtggtctgattgagcctgacacacctggccgtgtgtctcttgatgaagccttgcaacgtggcactgtggatgcccgcacagcccagaagctgcgtgatgtcagtgcctactccaagtacctcacgtgccccaagaccaagctcaagatctcttacaaggacgctctggatcggagcatggtggaggagggcacagggctgaggctgctggaagccgcggcacagtccagcaagggctactacagcccgtacagtgtcagtggctctggctctactgctggttcacgcactggttcacgcaccggctccagggccggctcccgtcgtggcagctttgatgccactggctctggcttctccatgaccttttcttcttcctcctactcttcctcaggctatggccgccgctatgcctcagggccttcagcctctcttgggggccctgagtctgcagtggcctgatcccccagcctgtatcctgccttcccgctctgcatgtcgccaggctccccgtggaggcgctggggtcttttctttcttcttctttttttttttttttttaacatttaaaggtgtcttcctcccaagcggtgcctaaaatctaaccaaaaagaccagaataacacattaatatatatatatatatgcgatgtccagacagcctgtgtcttgggaaacagggctggcccaggcccagtgaccactccactctccttgggcctccctaatcctttctacctgccactcaccacagctaggtgccttggagaatccagagctgggcactcagcccactactcctgtctctcctgggaggattgccatctgggaaaggcccccagacctctaagccaaccccactggatgtctacctgctggtcctagctgctgaggggaactggggacggtcctgtgagcagacagctgttgagtctcttgaggcctctgccctgagccagctgcttctccccagtgtatacctgaatattcagtgggttttgctggcaaaggaaagatcccaggccaaccatctcttccagcctgcccagagaagccccttccccatgggaagataaggcctggtcctggccccagcctcccgcctggctcctgcagctgccattggagctgtgctttgtagctcactaccccatacttattcccttgagacctgagcctctgcttcagccttccagcctcaactccccttgtaagtgccttctgtgtccttgtacccaggccctaaagacccagacccagggcaagagatggacattctggctgggcggggctggagggttctgcagatctgagaattccttctccagaggcccagggtcttcaagcctgtggaacccctctgggtgctgctgcccaccccactcccagggagccctggccagcccagctgtgctaacataagtacttggccagtgacactctcccttccctggccttggtggctcctacccctgcctccaccctctgagtgagctttgcatgttccactaaccttgagctggtgacaggtggagatgccaggcagaacactaacctgaccatgggcgggggccctgcggtgtccgcccctcaataaaagcaattccaaccttaaaaaaaaaaaaaaaa

SEQ ID NO: 1008 - DNA, 552 bp, Rattus norvegicus
  Genbank Accession No. NM_022500
atgacctctcagattcgtcagaattattccaccgaagtggaagctgccgtgaaccgcctggtcaacttgcacctgcgggcctcttacacctacctctctctgggcttcttttttgatcgggatgacgtggctttggaaggcgtaggccacttcttccgcgaattggccgaggagaagcgcgagggcgccgagcgtctcctcaagttgcagaacgaacgcgggggccgtgcactcttccaggatgtgcagaagccatctcaagatgagtggggtaaaaccctggaggccatggaagctgccttggccctggagaagaacctgaaccaggccctcttggatctgcacgccctgggctctgcccgcacagaccctcacctctgtgacttcttggaaagccacttcctggataaggaggtgaagctcatcaagaagatgggcaaccacctgaccaacctccgtagggtgcagggcccacaaccagcgcagactggcgtggcccaggcatctctgggcgagtatctctttgagcgcctcactctgaagcacgactag

SEQ ID NO: 1009 - DNA, 3332 bp, Rattus norvegicus
  Genbank Accession No. NM_022508
tcagaggcaagctccacacaggctctttccacagccagtcacagccgccaaccagtctttggtgacagtcttcttgctgcctgggcccaccggctccctcagactctcctgcctccgctgtcagcgggtcacgacgtcattccggtcgcctgcgcaccttcgctgctgggagcgcgacgcaggcgcattgactgagtttccccgggagatccctgagcacgtgggttgtgctgtcccgtacgcgcgcggagggactggaacctgaattttgctggtgttcttcgtgggtagcagactagaagggccatggcaccagcgggaatcctgaacgggaaagtggtctccgcgcaaatcaggaatcgactgaagacccaggttactcagatgcaggagcaggtacctggcttcacccctggcctggcaatcctgcaggttggcgacagagatgattccaatctttatataaatgtgaagctgaaggctgctcaagagatcgggatcaaagccactcacattaaattaccaagaacttccacagagtcggaggtgttaaaatacgtcatctccctgaatgaggatgccactgtgcacggattcatagtacagctgcctttagactccgagaattccattaacacagaggcagtcatcaatgccattgcccctgagaaggatgtggacgggttgacgagcatcaatgccgggaagcttgccagaggtgatctaaaggactgcttcattccgtgcacacccaaaggatgcttggaactcatcaaagagacaggagtgcagattgcaggaaggcacgccgtggtggtcgggcgaagtaaaatagttggtgcacccatgcacgacctgcttctgtggaacaatgccacggtgaccacctgccactccaagactgccgatctggacaaggaggtaaataaaggagacattctggtggttgcaacaggacagcctgagatggtgaaaggggagtggatcaagcctggagctgtggtcatagactgtgggatcaattatgttccagatgatacaaaaccaaatggaaggaaagttgtgggtgacgtagcatatgacgaggccaaggagaaggcgagctttatcacgcctgtccccggtggcgtggggcccatgaccgtggcaatgctgatgcagagcacagtagagagcgcacagcgcttcctgaagaaatttaagccagggaagtggacaattcagtataacaagctgaacctcaagacgcctgtaccaagtgacattgctatatcacgatcttgcaaacccaagctcatcggtaacctggcccgagaaattgggctactcactgaggaggtggaattgtatggagaaacaaaggccaaggtcttactgtcagcactagatcgcctgaagcatcagccagatgggaaatacgttgtggtgactggaattactccaacacccctgggagaagggaagagcacaaccaccatcgggcttgtgcaagcccttggcgcccacctgcatcagaatgtttttgcgtgtgtgcgacagccttctcagggccccacctttgggataaaaggtggcgctgcaggaggcggctattcccaggtcattcctatggaagagtttaatctccacctcactggtgacatccacgccatcactgccgctaataaccttgtggctgctgctattgacgctcggatatttcatgagctgacccagacagacaaggctctctttaatcgtctggtaccctcagtaaatggagtaagaaagttctctgacatccaaatccgcaggttacggaggctaggcattgagaagactgaccccgctgcgctgacagatgatgagataaacagatttgcaagactagatattgatccagaaaccataacatggcagagagtgctggatactaacgatagattcctgaggaagatcaccattggacaggctccaaccgagaaaggccacacacgcacggcccagtttgatatctctgtggccagtgaaatcatggcagtcctggccctcactagttctctggaagacatgagagcaaggctgggcaaaatggtggtagcgtccagtaagaaaggggagcctatcagctgtgaagacctgggcgtgagcggggcgctgacggtgctcatgaaggatgcgatcaagcccaatctcatgcagaccttagagggcacgccggtatttgtccatgctgggccttttgccaacattgcacatgggaattcctccatcattgcagaccggattgcactcaagctggttggccctgagggctttgtagtgacagaagcaggattcggagcagacataggaatggaaaagttcttcaacatcaagtgccggtattctggtctccagcctcatgtggtggttcttgttgccactgtcagggctcttaagatgcacgggggtggccccacggtcaccgctggactgcctcttcccaaggcttacacagaagaggacctggacctggtggaaaagggcttcagtaacttgaggaaacagatagaaaatgctagaatgtttggagtgcctgtcgtggtggccatgaatgcattcaagacagatacagatactgagctggacctcatcggccgcctctccagagagcatggggctttcgatgctgtcaagtgcacccactgggcagaagggggccagggagccttagccctggctcaggctgtccagagagcttcacaggcccccagcagcttccagctcctctatgacctcaagctctcagttgaagataaaatcaggattattgcacagaagatctacggggccgatgacatcgaattgctccctgaagcacaaaacaaagcagaaatctacacaaagcagggctttgggaatctacccatctgcatggccaaaacacacttgtctttatctcacaacccagagcaaaaaggggtgcctactggcttcgttctgcccatccgggacatccgggccagcgttggggctggtttcctgtaccctttagtaggaacgatgagcacaatgcctggactccctactcgaccctgtttttatgatatcgatttggaccctgaaactgaacaagtgaatggattgttttaaacagatcttccatctccaagaggctactctgtctggccagtgtctgttcaggcccactgaggaagtgtgcagagaagtcttgaaagtctgtgcctgccctgaagagcttcagaaatagtggaagtttctctaaagcctttcatagccttaattcagatcatgtataaattaacataaatcatgcctatttacatagtaaaagtccacagaataaatga

SEQ ID NO: 1010 - DNA, 689 bp, Rattus norvegicus
  Genbank Accession No. NM_022511
atggccgggtggaacgcctacatcgacagccttatggcggacgggacctgtcaggacgcggccatcgtaggctacaaggactcgccctccgtctgggccgctgtccccgggaagaccttcgttagcattacgccagctgaggttggtgtcctggtaggcaaagaccggtcaagttttttcgtgaatgggctgacacttgggggccagaaatgttctgtgatccgggactcactgctgcaagacggggaatttacaatggatcttcgtaccaagagcaccgggggagcccccaccttcaatgtcactgtcaccatgactgccaagacgctagtcctgctgatgggcaaagaaagtgtccacggtggtttgatcaacaagaaatgttatgaaatggcctctcacctgcggcgttcccagtactgacctcatctgtcccttcccccaccggtccctttggcttttgcacccccttctttccatacacacacacaccattattttttgggccattaccccatttcccttattggtgccaaaaccacatgggctgggggctggggctggatggacagacacctccccctacccataccccctcctgtgtgtgtttggggaaaaaatgtttttggggtttaattttgttttaatttttggtttgtttttttttttttttctgaataaaaaaagat

SEQ ID NO: 1011 - DNA, 2288 bp, Rattus norvegicus
  Genbank Accession No. NM_022532
gcggtagcgtgtgacaggaggcctatggcacctgcccagtcctacctcagcccatcttgaaaaaatccttagacaacatggaaccaccacgaggccctcctgctagtggggctgagccatctcgggcagttggcactgtcaaagtgtacctgcctaacaagcaacgcacagtggtgactgtccgggatggcatgagtgtctatgactctttggacaaggccctcaaggtgcggggtctcaatcaggactgctgtgtggtctacagactcatcaaaggaagaaagacagtcactgcctgggacacagccattgcacctctggatggcgaggagctcattgtggaggtcctggaagatgtgccactgaccatgcacaattttgtacggaagacattcttcagtttggccttctgtgacttctgccttaagtttctgttccacggctttcgctgccaaacctgtggctacaagttccaccagcattgttcctccaaggtccccacggtctgcgttgacatgagtaccaaccgccgacagttctaccacagcatccaggatttgtctggaggctccaggcagcaggaggttccctcaaatctctctgtgaatgagctgctaaccccccagggtcccagtccctttacccagcaacgtgaccaggagcacttctccttccctgcccctgccaatcccccactgcagcgcatccgctccacatctactcctaacgtccacatggtcagcaccacagctcccatggactccagcctcatgcagtttactgctcagagcttcagcaccgatgctgctggtagaggtggtgatggagctcctcggggtagccctagcccagctagtgtgtcttcagggaggaagtccccacattccaagttacctgcagaacagcgggaacggaagtccttggcagatgaaaagaaaaaagtgaagaacctggggtaccgggactcaggctattactgggaggtgccacccagtgaggtacagctgttgaagaggatcgggacaggctcttttggcactgtgtttcgggggcgttggcatggcgatgtagctgtgaaagtgctcaaggtggcccaacctaccgctgagcaggcccaggccttcaagaatgagatgcaggtgctcaggaagacacgacatgtcaacattttgctgtttatgggtttcatgactcggccagggtttgccatcatcacacagtggtgtgagggttccagcctctaccaccacctacatgtggctgacacgcgctttgacatggtccagctcattgatgtggcccggcagactgcccagggcatggactacctccacgccaagaacatcattcaccgagacctaaagtccaacaatatcttcctacatgaggggctcacagtcaagattggtgacttcggcctggccacagtgaagacacgatggagtggggcccagcccttagagcagccctcagggtctgtgctgtggatggcagctgaggtgatccgaatgcaggacccgaacccctacagcttccagtcggatgtctatgcctatggtgttgtgctctatgagcttatgaccggctcactgccctacagccacattggcagccgtgaccagatcatctttatggtgggtcgtggctatctgtctccggacctcagcaaaatcttcagtaattgccccaaagccatgaggcgcttgctgactgactgcctcaagttccagcgggaggagcggcctctatttccccagattctggccacgatcgagctgctgcagcggtcactccccaagattgagcggagtgcctccgaaccctccttgcaccgtacccaggctgatgagttgcctgcctgccttctcagcgcagcccgccttgtgccttagactccactcccagcccactagggagccattttcagcttaccatgccaaggcacccccttcctaccagccaatcattgttctgtctgtgccctgatactgcctcaggattccctatcccacaccctgggaaatttgggggactccaaaaactgaggtcccctgcttcctccataatttggtctcctcttggctttggggatagttctaatttggagagctgttttacctccaatggctgggattcagtgcaaagattccactcggaacctctttataaagttttcgcctgacatgtcttcactgaattatggggttcccagcaccccatgcggatttgggagtttccctttgtctccccccactattcaaggactctcctctttaccaagaagcaca

SEQ ID NO: 1012 - DNA, 1475 bp, Rattus norvegicus
  Genbank Accession No. NM_022533
tgcccaaacaccagcacactaggggttcttcacgatctctatccagagcaaacaggcgaaccgagggttaaggggcggggcctcttcgaggggcggggcctcgggcggagcggggtcgggcttcgcgcacctgtaggttctgtctagggatccgctgtcgcagccccggagcagcgccgggagcgcgtcccgagcgtcgtaggctcgcgatcgctatggcggagttcccgtcgaaagtgagcaccaggaccagcagccccgcgcagggcgtgggagcatctgtgtctgcgatgcgaccggacctgggctttgtgcgctccgcccttggggtgctcgcgcttctgcagctggtgctggggctgctggtgtgggccttgattgctgacaccccataccacctgtatcctgcctacggctgggttatgtttgtagctgtcttcctctggctggtaacaattgtcttcttcatcatctacctgtttcaactgcacatgaagttgtatatggtgccctggccgttggtgttactggtcttctttgttgctgccaccgtcctctatatcaccgcctttgtcgcctgtgcggcggcggtcgatctgacatccctgaggggctcccgaccgtacaaccagcgctcggctgcctctttctttgcttgtctggtgatgattgcctacggactgagtgctttcttcagcttccaggcctggcgaggagtgggcagcaacgcggccacgagtcagatggctgggggctactcttaagccagctatgctgtgacctaagccacggctgggtcttagcacagggccacccccaaccttaccaggcttaagctctccaagcactcctgaggaacaggcccaagctggcacagatggacagccaagagccaggagcggggacatcctcctcacctcccttattcagcagaagatgatggggttggggggctcttgtggctttgccttgtcatcagagaacttcagtgtcccaggctgggccaccctgctcaccagcactaaatgcactaacagaccttcagcctctgatctgcctagtgtaaacctaacaagacaacacatgatctacgttccagaagctaagcccacccccaggctcttctggacccacctccccctcccctaccgcacgccaacccattgtcacctgtagagagacttttatagaagagttgggatttcgaggactggactatttcagttggtttcaatagtttccaagacagcaagcctcaccatgtcccctccctcacgtggaactctttctctcctttgggagagagcatccgtgcagggtgctccccccaggctgctgattagacacaggggacttccaaggagggagagagggaagcagggccttgcctggtgagttgtcaggaggttaatggcgactcttatttggaattattattttttacaatttaaataaaaatggatgtgtctgtttgg

SEQ ID NO: 1013 - DNA, 1808 bp, Rattus norvegicus
  Genbank Accession No. NM_022534
caagccctcaaggcgggttccaggagtctctcacctcccacctgtgcctgccatggagctcctgaaggcgctgctactcctgtctggagtcctcggggctcttgctgaattctgtgtaataccaaagatggacggccagctggtagagaagctgggccagcgtctcttaccttggatggatcggctttcctcagagcagttgaaccccagcatctacgtcggcctgcggctttccagcatgcaggctgggaccaaggagaacctctaccttcacaacctcaaactccattaccagcagtgcctcctgcggtccacctcgagtgatgataacagtggttgccagactaagatttctgggggcagcttggccctctacctgcttgctctcagggccaactgtgagctcctggggagccgaaagggtgacaggatggtctcacagctcaagtggttcttggaggatgagaagaaggccattgggcaccatcatgaaggccacccccacaccagctattaccagtatggcctcagtatcctggccctgtgcgtccaccggaagcgggtccatgacagtgtggtgggcaagctcctgtatgctgttgaacatgactactttacctaccagggccacctctctgtggacacagaagccatggccggcttggccttcacctgtttggaacgattcaatttcaactctgacctgagaccacggatcaccacggccatcgagacagtgcgagagaagatcctgaaggcccaggcccctgagggctactttggaaatatctatagcactccgctggcactacagatgctaatgacctctcctggggtagggctgggcccagcttgcctcaaggcaaggaaatccctgctgctcagcctacaggatggagccttccagaatcctatgatgatttcccagctgctacccgtcctgaaccacaagacctacttgaatcttatctccccagactgccaggcacccagggtcatgttggtgcccgccactgaggaccctgtccacttgtcagaagtcagcgtcacgctgaaggtctccagtgtcttgccaccatatgaacgaacagtttccgtctttgctggggcctccttggaagatgtcctgaacagggcgcgagaccttggagaattcacgtatgggacccaggcctccttgtcaggtccctacctgacatccgtactagggaaagaagctggggatcgagaatactggcagcttctccgagtccctgatacccctctgctacaaggcattgctgactacaaacccaagaacggggaaaccatcgaattgcggctagttaagatgtagccctaggctccctcctgatgtcttcggaccctgctgccacctcaagtgcgcttggaacaatgtcccccagatcacctcagctaacttcccaaagaggacctaagccactgtccaccttagagcaggaaggaaaacacctcctcccttagggaggctgctagcttgagtgtggccctgcctgactccacaggtctttcatgaagattgccccataagtctgaggaacaggatgccctcaactccctctacataaaggagtctgttggccatgggtgttgtgagtaccattgctctgggactggggtcctacaagaaggacctccatggcccaagtgctgtggttctgacccacacaccctacccctgctctctctcaggatggtggtcccaaagctggtcgtgaagcagcctttggccctcaacagggtcttccaacacaattaaagccttgatttacctaaaaaaaaaaaaa

SEQ ID NO: 1014 - DNA, 1944 bp, Rattus norvegicus
  Genbank Accession No. NM_022539
ggtgaagaaggagcgggccctcgccgctcgttctcgctccctctttctctctctcttcttctctctctctttccctctcgggcaacatggcgggcgtggaagaggcatcgtctttcgggggccacctgaatcgcgacctggatccagacgacagggaagagggaacctccagcacggccgaggaagccgccaagaagaaaagacggaagaagaagaagggcaaaggggctgtgtcagcagggcaacaagaacttgataaagaatcgggaacctcagtggacgaagtagcaaaacagttggagagacaagcactggaggagaaagagaaagatgatgacgatgaagatggagatggtgatggtgatggtgcagctgggaagaagaagaaaaagaagaagaagaagagaggaccaagagttcaaacagaccctccctcagttccaatatgtgacctgtatcctaatggtgtatttcccaaaggacaagagtgtgaatacccacccacccaagatgggcggacagctgcttggagaaccacaagtgaagagaaaaaggcgctagaccaggctagtgaggagatttggaacgacttccgagaagctgccgaagcacaccggcaagttaggaaatacgtcatgagctggatcaagcctgggatgacaatgatagaaatatgtgagaagttggaagactgttcccgaaagctcataaaggagaatgggttaaatgcaggcctggcctttcccactgggtgttctctcaacaactgtgctgcacattacactcccaatgctggtgacacgacagtcttacagtacgacgacatctgtaagatcgactttggaacgcatataagtggtagaataattgattgtgcttttactgttacttttaatcccaaatatgacatattattaaaagctgtaaaagatgccaccaatactggaataaagtgtgcggggattgacgtccgtctctgtgatgtcggcgaggccattcaagaagttatggagtcctatgaagtggaaatagatgggaagacctaccaagtgaaacccatacgtaacttaaatggacattcaattgggccatatagaattcatgctggaaaaacagtgcccattgtgaaaggaggggaagctacaaggatggaggaaggagaggtgtatgccattgagacctttggtagcacagggaagggcgtggttcatgacgatatggaatgttcacactacatgaaaaattttgatgtgggacacgtgccaataaggcttccaagaacaaaacacttgttgaatgtcatcaatgaaaactttggtacccttgccttctgccgaaggtggctggatcgcttgggagaaagtaaatacttaatggctctgaagaacctgtgtgacttgggcattgtagatccatatccaccactctgtgacattaaaggatcatacacagcacagtttgaacataccatactctgcgcccaacctgtaaagaagttgtcagcagaggagatgactattaaaacttagtccaaagccaactcaacgtctttattttctaagctttgttggaacacattataccacaagtaatttgcaacatgtctgttttaacagtggacctgtgtaatgccgttatccatgtttaaaggagtttgatcaaagccaaactgtctacatgtaattaaccaaggaaaaggctttcaagactttactgttaactgtttctcccgtctaggaaatgctgtactgctcactagttaggaattacttaaacgttttgttttgaagacctaagagatgctttttggatatttatattgccatattcttacttggatgctttgaatgactacatacatccagttctgcacctatgccctctggtattgctttttaaccttcctggaatccattttctaaaaaataaagacattttcagatc

SEQ ID NO: 1015 - DNA, 2183 bp, Rattus norvegicus
  Genbank Accession No. NM_022542
gttcgcaaaatcagccatcgactcgcacaaagcagcgcactccgggacagccgagaacactacccggcagcagcgcggcgacactccgtgcatcgtatgcccctgcgcccctgccgcggcagccggagcgccccgagagaacgctccaccgcggggtccaggtgcagttagcgtgcctagcccgcatcgcgcggtcgcgggagagcgggaagcggcaagcagggagcgggacggcggcgaggcgctcgcgggcccctcctgctgcccgcgcccggcgagctcatggcggccatccgcaagaagctggtggtggtgggcgacggcgcgtgcggcaagacgtgcctgctgatcgtgttcagtaaggacgagttccccgaagtgtacgtgcccaccgtgttcgagaactatgtggcggacatcgaggtggacggcaagcaggtggagctggcgctgtgggacacggcgggccaggaggactacgatcgtttacggccgctctcctacccggacaccgacgtcatccttatgtgcttctcggtagacagcccggactctctcgagaacatccccgagaagtgggtgcccgaggtaaagcacttctgccccaatgtgcccatcatcttggtggccaacaaaaaagacctgcgcagcgatgagcatgtccgcacggagctggcccgcatgaagcaggagccagtgcgcacggatgacggccgcgccatggcggtgcgcatccaagcctatgactacctcgagtgctcggccaagaccaaggagggcgtgcgcgaggttttcgagacggccacgcgcgccgcgctgcagaagcgctacggatcccagaatggctgcatcaactgctgcaaggtgctatgaaggccgcgccctgcctcacgcccttgccagcgtggctccccctccttggcccggtcgcccactaaccgggagaaagggagacccgtgcccccgaggacaccaccagactgcctgacatctgctggtggctctggctggtcacgctgaatattagcgtgggcaccgagctccccccttcccagtgtctgtgtgtgtccagctgtgtggcacaggcctgggcgccctgctgagtgccaaggggttcctgagcgtccttttctaaagagccaggcctcgaagtgtggttgtgtgtgtgtacgactccctacacccctaccccactcctgccccacccccgcctctggtttccccaggggcatgcagagtggttgagccccagcagatgtacgcttgtaaccagcaagccactactgttgctccatgtctgtaacatagaccccctggaatcacgggaggggagggctggggaggatggggatgttacataaatacagattttattttcggaggcagaatggtattgtttagtggtgagtggtgtgaccagggcccatgagcaactcttcccaggctgggtcaggagcccacccatccaagcatgaactggactcggccatctttccacaccctggggaagacatttgcaactgacttgaggttgagaggaagcagctcccagacacagtgtctcctgggccaagccccagcgaacctcctttccagccacctgcagaggatccagggtgtgctgtggggtcacttttgccataagcgaactttgtgcctgtcctacaagtgaacattgttcagtccgagagactattgttgctgaatttatttaaaggctgaagctttttttgttgttgatgaaagaattctttgcacaattgtcccattgtttgacacccagtgcacttgtcatttgcataaggcagcattttgaccacacttgtatgctgtaacctcatctacttctgatgtttttttttttaaacaaactatgatgactttaaggagattacaaaaaagattctaatttttgctttgttttcttgaaaaaaatgtcaaccatgtgactttttaaaaatttgtgtagcatacacacagttttggtaaaggaaggcaacacgtattggggtctatttaaacctccctccctctccccacaagacaagtctcttcatctatgtgaaattttctgtacattctctgtgcagagcaaagcttcttcttccttattcccctccttcccagcccagtggtacttctactaaattgtctattgtcttgttttgtttttgttttatttt

SEQ ID NO: 1016 - DNA, 3109 bp, Rattus norvegicus
  Genbank Accession No. NM_022547
cccgtctgggagctcgcggttcctgtgctgactctcaaagggctgactgaccctcgcacctagcaggtacttctggattgcaagtccagggttctgggccggtgaccctgttttctctacttcctgtctttgaccttgggtaccttccaacccactgttgccatgaagattgcagtaatcggacagagcctgtttggccaggaggtttactgccagctgaggaaggagggccacgaggtggtgggtgtgttcacaatcccagacaaggatgggaaagcagaccccctgggcctggaggctgagaaggatggccgtgccgtgttcaagtttcctcggtggcgtgctcggggacaggctctgcccgaggtggtggccaaataccaggctctgggtgcagagctcaatgtgcttcccttctgcagccagttcatacccatggaggtcattaatgcccccaggcacggctccatcatctaccatccatccctgctacccaggcatcgaggggcttcggccatcaactggaccctcattcatggagataagaaaggaggcttcaccatcttctgggctgatgatggcctggacactggtgaccttctgctgcagaaggagtgtgaggtgcttccagatgacaccgtgagcacgctgtacaatcgtttcctcttcccagagggcatcaaagggatggttcaggctgtgcgactgatcgcagagggtacagccccccgctgcccccagtctgaggaaggagccacctatgagggcattcagaagaaggagacagccaagatcaattgggaccagccagcagaggccattcacaactggatccgtgggaatgacaaggtgccaggtgcctggacagaggcttgtgggcagaagctgacatttttcaactcgacactcaacacttcaggactgtcaacccagggagaagctttacccatcccaggagcccatcgtccaggcgtggtcaccaaagcaggactcatcctctttgggaatgagcatagaatgttgctggtgaagaacatccagctggaagatggcaagatgatgccagcctcccagttcttcaaggggtccgctagcagtgacctggagctgacagaggcggagttggccacggcggaggctgtgcggagctcttggatgcgaatcctgccgaacgtcccagaggtggaagactctacagatttcttcaagtcaggagctgcttctgtagatgttgtgaggctggtggaggaagtgaaggagctgtgtgacgggctggagttagaaaatgaagacgtttacatggccaccacctttagggagtttatccagctcctagtgaggaagctgagaggggaggacgacgagagcgagtgtgtcattaactacgtggaaagggcagtgaacaagctgactctccaaatgccctaccagctcttcataggcggcgagttcgtggacgctgagggctctaagacctacaataccatcaacccaacggatggaagtgtcatctgccaggtgtccctggctcaggtgagcgatgttgacaaggcagtggcagcagcaaaggaagccttcgagaacggactgtggggaaagataaatgctcgtgaccggggccggctcctgtacaggttggcggatgtcatggagcagcaccaggaagagctagccaccattgaggccctggatcgaggtgccgtctacacgctggccctgaagacgcacgtgggcatgtccatccagaccttccggtactttgctggctggtgtgataagatccagggtgccaccatccccatcaaccaggctagacccaaccgcaacctgaccttgaccaagaaggaacctgttggggtctgtggcattgtcatcccctggaactatcccttaatgatgctatcctggaagactgcagcctgcctggcggctgggaacaccgtggtgatcaagcctgcccaggtgaccccactcacagccttgaagtttgccgagctgacactgaaggctggcattcccaagggtgtggtcaacatcctcccaggatctggatccctggttggccagagactctcagaccaccctgatgtgaggaaaatagggttcacaggctccacggaggtggggaaacacatcatgaaaagctgtgctctgagcaacgtgaagaaagtctccctggagctgggtggaaagtcaccccttatcatatttgctgactgcgacctcaacaaggccgtgcagatgggcatgagctccgttttcttcaacaaaggggagaactgcattgcggcaggccggctctttgtggaggagtccatccacaaccagtttgtgcagaaagtggtggaggaggtggagaagatgaaaatcggcaatcccctggagagggacaccaatcatggcccgcagaaccatgaggcccacctgaggaagctagtggagtattgccaacgtggtgtgaaggaaggggccacactggtctgtggtgggaaccaagtcccaaggccaggattcttctttcagccaaccgtcttcacagacgtagaggaccacatgtacatcgctaaggaggagtcctttgggcccatcatgatcatctctcggtttgctgatggggatgtggatgctgtgctgtcccgggccaatgccacagaatttggcctggcctctggggtcttcacccgcgatatcaacaaggccctgtatgtcagtgacaaactgcaggcaggcactgtgttcatcaacacgtataacaagactgatgtggccgcaccttttggaggattcaagcaatctggatttggcaaagacctgggagaggcagccctgaatgagtacctgcggatcaagactgtgacttttgagtactgaagccaagtctgtgatatttctcctgtaccctgttgcctcccctcagggagccctggcccctgtctggtgtcttagcaccctcctgtccccaacactgttcccttcagctgctggagctatcagtgtggacccctgctggtgacaggacacctccggacaattggaagtggttccaagtggagtgagcagtcatgtcccggatgaataaaggttgtgagcagaagtcacctgcaaaaaa

SEQ ID NO: 1017 - DNA, 2254 bp, Rattus norvegicus
  Genbank Accession No. NM_022590
agagaatggagggacacgtagaggaaggctctgaacttggggagcagaaggtcctgattgataatcctgctgacattctggtcattgccgcgtatttcctgctggtcattggtgttggcttgtggtctatgttcagaaccaatagaggcacagttggtggctacttcttggcaggacggagcatggtgtggtggccggttggagcctctctgttcgccagcaacatcggcagcggtcattttgtgggcctggcggggactggtgcagcaagtggcttggccgtggctggatttgagtggaatgcgctctttgtggtgttgctcctcggctggctcttcgtgcctgtgtatctgaccgccggagtgattaccatgcctcagtacctccgcaagcgctttggtgggcgccgtattcgcctctacctgtccgtgctctcgctttttttgtacattttcaccaagatctcggtggatatgttctccggagcagtattcattcaacaggccctgggctggaacatttacgcttctgtcatcgcactcttgggcatcaccatgatttatactgtgacaggagggctggcggcactgatgtacacagacactgtgcagaccttcgtcattcttgccggggccttcatcctcactggttatgctttccatgaagtgggcgggtactcaggtctcttcgacaaatacctgggagcagtgacttcactgacggtgtccaaggatccagctgttggcaacatctccagcacctgctatcagccgaggcccgactcctatcacctgctgcgtgaccctgtgacaggagggctgccgtggcctgcgctgcttctggggcttaccattgtctcaggctggcactggtgcagtgaccaggtaattgtgcagcgctgcctggctggaaagaatctgactcacatcaaggctggatgcatcctgtgtggttacctgaagctgatgcccatgttcctcatggtcatgccaggcatgattagccgcattctttacccagatgaggtggcctgtgtggtacctgaggtgtgtaagcgggtgtgtggcactgaggtgggctgctctaacatcgcctacccacggcttgttgtgaagctcatgcccaatggtctgcgtggactcatgctggcagtcatgctggccgccctcatgtcttctctagcgtccatctttaacagcagcagcacactcttcaccatggatatctacacacgcctgcggcctcgggcgggtgatagggagctgctgctggttggaaggctttgggtggtgttcattgtggcagtgtccgtggcttggctgccagtggtgcaggcagcacagggcggccagctcttcgattacattcagtctgtctccagctacctggcgcctccagtgtccgctgtctttgtgctggcactctttgtgccccgtgttaatgagaagggtgctttctggggactcattgggggcctgctgatgggcctagctcgtctcatacccgagttcttctttggcacgggcagctgtgtgcgaccctctgcatgcccagccatcttctgccgggtacactacctctacttcgccatcattctcttcttctgctccggcttcctcacactcgcaatctcccggtgcaccgcacccatccctcagaagcatctccaccgcctggttttcagtctccggcacagcaaggaggagcgggaggatctggatgctgaagagttagagggtccagcccctcctcctgtgcagaacgggtgccaggaatgtgcaatggggattgaagaggtccagtccccagctccaggcctgctccgccagtgcttgctctggttctgtgggatgagcaagagtgggtcagggagtcctccacccactaccgaggaggtggctgcaaccaccaggcggctagaggacatcagtgaggatcccagctgggcccgagtagtcaacctcaatgccctgctcatgatgactgtggctgtgttcctctggggcttttatgcataaagtcaagtgtgttggttaccatgagttgcaaccagggcatgtctgagcctcatgaaaagtgagggtgaagaacttgtagtggatcccagaaaagggcaaaaatacggcaggaaggaactggttcccttcctctttacctggggtccagtccatttgattggttgtcacttcccacaagatggtggccaatttgtcatagatgtttgcctatgcaaaaataaagctgcccttctaac

SEQ ID NO: 1018 - DNA, 2098 bp, Rattus norvegicus
  Genbank Accession No. NM_022592
gaattcgggaatgtcatggatccagtgagacagatccagtgcgaccgtgaaggcaaacgctttccgttcctctcagctccaccagcttccacgtcctcgcccgaccgcgccatggagggttaccataagccagatcagcagaagctccaggccctgaaggacacagccaatcgcctgcgcatcagctccatccaggccaccaccgcggcaggctcgggacaccccacatcatgctgcagcgctgccgagatcatggctgtcctgtttttccataccatgcgctacaaggccctggatccccgaaaccctcacaatgatcgctttgtgctctccaagggccatgcagctcccatcttatatgcagtctgggctgaagctggcttcctgcctgaggcagagctgctgaacctgaggaaaatcagctctgacttggatgggcatcctgtcccgaaacaagccttcaccgatgtggccactggctccctgggccaggggctgggagctgcgtgcgggatggcatacacaggcaaatacttcgacaaagccagctaccgagtctattgcatgctgggagacggggaggtgtccgagggctccgtttgggaggccatggccttcgctggaatttacaagctggacaacctcgttgccatttttgacatcaaccgtctgggccagagcgacccagccccgctgcagcaccaagtggacgtctaccagaagcgctgtgaggcctttggctggcacgccatcatcgtggatgggcacagtgtggaggagctgtgcaaggcctttggtcaggccaagcaccaaccaacagccatcattgccaagaccttcaagggccgcgggatcacagggattgaagacaaggaggcgtggcatgggaagcccctccccaaaaacatggctgagcagattatccaggagatttacagccaggttcagagcaaaaagaagatcctcgccacgccccctcaggaggatgccccttccgtggacattgccaacatccgaatgcctaccccacccaactacaaagtgggggacaagatagccacacggaaagcctatggattggcccttgccaagctgggccacgccagtgaccgcatcatcgccctggatggagacaccaaaaattccaccttctcagagctcttcaaaaaggagcacccagaccgtttcatcgagtgctacattgctgagcagaacatggtgagcattgctgtgggctgtgccacacgtgacaggacagtgcccttctgcagcacttttgcggccttcttcacacgcgccttcgaccagatccgcatggccgccatctccgagagcaacatcaacctttgtggctcccactgcggcgtgtccattggggaagacgggccctcgcagatggccctggaagacctggccatgtttcggtcggtccctatgtccaccgtcttttacccaagtgatggagttgccacagagaaggcagtggaattagcagccaatacaaagggcatctgcttcattcggaccagccgcccagaaaatgccattatctatagcaacaacgaggatttccaggttggccaagccaaggtggtcctgaagagcaaggacgaccaagtgacagtgatcggggctggcgtaactctgcacgaggctctggctgctgcagagatgttgaagaaagagaagatcggtgtccgtgtactggaccccttcaccatcaagcccctggacaaaaagctcattctcgactgtgccagagcaaccaaaggcaggatcctcaccgtggaggaccactactatgaaggtggcataggcgaggcagtatctgctgtggtagtgggcgaacctggagtcacagtcactcgcctggcggtcagccaagtaccacgaagtgggaagccagctgagctgctgaagatgtttggtattgacaaagacgccattgtgcaagctgtgaagggccttgtcaccaagggctaggaaggacatgggatgccgggtgggtgaactacacattccagggatgttctggcaaaggtgctcaagggtgtaccgagtggaaaggtaaatatatgttttgagaaaaaccgaattc

SEQ ID NO: 1019 - DNA, 1097 bp, Rattus norvegicus
  Genbank Accession No. NM_022594
agctccagagatggctaccgcgatgacagtttccagcaaactcctcggcctgctgatgcagcagctgagaggtacccgccagctgtacttcaacgtcagccttcgatctctgagctcctctgcacaagaggcgtccaaaagaatccctgaggaagtctcagaccacaactacgagtctattcaagtaacatctgcccagaagcatgttctgcatgtacaactaaaccggccggagaagaggaatgccatgaacagggctttctggagggagttggtggaatgcttccaaaagatatctaaagactccgactgtcgggctgttgtggtctctggtgcaggaaagatgttcacttcaggtattgacctcatggacatggcatcagacatcctgcagcccccaggagacgatgtggcccgcatagcctggtacctccgagacctcatcagccgataccaaaagactttcactgtcattgagaagtgccccaagccggtgatcaccgcaattcacggaggctgcattggtggaggcgtggatcttatttctgcctgtgacattcgctactgcactcaggatgctttcttccaagtcaaggaggtggatgtgggcctggctgctgatgtaggaacgctgcagcgactgcccaaggtcattgggaaccggagcctggtcaacgagctgaccttcaccgcccgcaagatgatggctgacgaggccctggacagtgggctggtcagccgcgtgttcccagataaggacgtcatgctgaatgcagcctttgccctggcggccgatatttccagcaagagtcctgtggctgtgcaggggtcaaaaatcaatttaatctactcccgagaccattctgtggacgagagccttgactatatggccacttggaacatgagcatgctgcagacccaggacatcatcaagtcagtccaggcagccatggagaagaaggactcaaaaagcatcaccttctccaagctctgagtgccttcctgaccctggtcccctcagtgcctcctcccggtgtataactttatgacttagttcttcagttcccggggccttatctccactgtgaacaataaag

SEQ ID NO: 1020 - DNA, 1640 bp, Rattus norvegicus
  Genbank Accession No. NM_022598
agagccgtgcgcagcggcgtgtgtggggccgtgtgcagacccgcgtgtggcgcaggcaaggaccctgaaaataaacagccgctgctttgcgagtctccttcttgggtctacgtccgagtctcctctgctgtgggcagctcagacgccgaagctctaactgcagctatgagcagcaacgaatgcttcaagtgtggacgatctggccactgggccagggaatgccctactggtggaggtcggggtcgtggaatgagaagccgcggcagaggtggttttacctcggatagagggttccagtttgtttcctcgtctcttcctgacatctgttatcgctgtggtgagtctggtcatcttgccaaggattgtgatcttcaggaggatgcctgctataactgcggtagaggtggccacattgccaaggactgcaaggagcccaagagagagcgagagcaatgctgctacaactgtggcaagccaggccatctggctcgtgactgtgaccacgcggacgagcagaagtgctattcctgtggggaatttggacatattcaaaaagactgcaccaaggtgaagtgctataggtgtggtgaaactggtcatgtagccatcaattgcagcaagacaagtgaagtcaactgttaccgctgtggcgagtcagggcatcttgcacgggaatgcacaattgaggctactgcctaattattttcctttgtcgcccctcctttttctgattgatggttgtattattttctctgaatcctcttcactggccaaaggttggcagatagaggctgttcccaggccagtgagctttacttgcagtgtaaaaggaggaaaggggtggaaaaaaaaccgaatttctgcatttaactacaaaaaaagtttatgtttagtttggtagaggtgttatgtataatgctttgttaaagaaccccctttccgtgccactggtgaatagggattaatgaatgggaagagttcagtcagaccagtaagcccttctgggtttgagtgtgttcccatgtaggaggtaaaaccaattctggatgcatctaagcttccatgaataactttaattcttagcataatgatggccttggattgtctgacctcagtagctattaaataacatcgagtaacatctgcatcaggccctcatagaacattcagttgagttgggagtaaactgaaaagacaaatgtgttgaaggatatgccagggaatctggctaaagcctaatacaggagcatcttcatcccagtgttgatgctggacgtacagaaggtgatggcaaaggtgtagaacacattttttcaaagactaaatctaaaacccagagtaaacatccgatgctcagagttagcataatttggagctattcaggaattgcagagaaatgcattttcacagaaatcaagatgttatttttgtatactatatcacttagacaactgtgtttcatttgctgtaatcagtttttaaagtcagatggaaaaagcaactgaagtcttagaaaatagaaaatgtaattttaaactattccaataaagctggaggaggaaggggagttttgactaaagttccttttgtttgttttaaattttcatcaatgtatatagaacaaaatgccatattaaaga

SEQ ID NO: 1021 - DNA, 5215 bp, Rattus norvegicus
  Genbank Accession No. NM_022599
gagagcccagccttctccctggctcctatttaagcatcaggcaaagaccgtgggtcccagcaacagcagtgaggaggcacttggcacttcgggcaggtggtagccgctgtgcctggcaccttggcatcctgcctgggctgcacgtggcctggcacccatacagctcctgattgctgcggctggaaggagcctgtgattctgcgtgagtgtggggtccttgggtatacagtcagccgaggtagaggtgggctggcctaggactgtacacttctctaggagctgggcttaactaaaacagaagagattgcggttagacatcaagaggaactcagacccgtgggaaagaaccaggacctgaggcaaaggcgagatttgggtggtggacgggggacagggagactcttcacagtcctcacaggacctacacaggggcctatggtctcagacctgggatcatgttcctgagggggtataagagagaggggcaggtcaggaagcataggaagtcagttgcacatgggggagggttgtggggaaactgtaaaagctatgctggggaggcggcacggagcttgattcaccttcacctgcgccgggcacccgctgaccccgggtttccgcccggagagcagtcagatatgaacggacgggtggattatttagtctccgaggaagagatcaacctgaccagaggaccctcggggctgggcttcaacatcgtcggtgggacagatcaacagtatgtctccaatgacagtggcatctacgtcagccgcatcaaagaggatggggctgcggcccgggatgggcggctccaggagggtgataagatcctctcggtaaatggccaagacctgaagaacctgttgcaccaagatgccgtagacctcttccgtaatgcaggatatgccgtgtccctgagagtgcagcacaggttaccagtgcagaatggacctatagttcatcgaggcgacggagagccgagtggagttcctgtagctgtggtgctgctgccagtgtttgcccttaccctggtagcagtttgggccttcgtgagataccgaaagcagctctgagatgcctgttgtcttccagtgtgtccgatgagctaactatctctctcactcaccatctcgacatcctcccctagtcttccttcccacatagccaacacatgatttaaagtgactgcttatcacccgaaaccttgctgttcaaaatctccaagacttcacattctaatggaagagtaaagagattatttgaagaaagctgggggtggggagagccttgcttagaataaatgagaagttacatattttactagaactgccaataaaaattcagctatcagccaaagaggagaagcttgctcttcctgtctccatggacgacaccttttgcttagctggtgtgctttgaaggctagctgtgctatgtgaaaggaggagctgattttttaaatactttttcttgggaagtatttgtggcctttaatttgtaactatatacttagatgcctatattggacataggcgaatgaatttttttcttttcttagaaaagaaaatacatatatacattaacacacacacacacacacacacacacacagcataaaactgatgccttatggagagttaaagaggtgagaaaactactggttcttggatttctagtggacaagttttgggaactagggggtcatattcctttatatataatcaaaactcatattaaagaatgagttctggattgtaaagagaacttactttttccacttgtctgtaagtctttgtccacaagttaaaaacatacacagtcctaagggctgatcataactgaaacacttcaaaaattattggcagagaaggtataacggggatggaaaagttagctttaaaagagaatgctcagtcagtggcattaggaaaataatgactgaagcaattagttgaaaactgtagaacaactagtgttccagggtagctacagtgatgtgggaaattgtggcaaagcagttcttctcaagtcaatttgtttaaaagactttggggtgtaaagatgagtcctgacagtctctgaatgaccttagtgactgttgtactatgtgaaaggatccattggcatggagatgagaagtaggagggccaaataaaccatcaagacaactgaaaaaagatcatacctcagggtggcacttgaaccctcaaagtgctcaccaactttcagtttctagtatcaggcaaagcctaagggaagggactgctttcctggcagggtggaccccaaatcagcctgcttctgatagagttacgatgagaaggcccaaattgatgtaggctttctttttgtgtatttttcccaaagctataagcactagttttggttttaataaggtaatggaccattttttcagaaaaaggggaaggaataaggtttgtttgtttatagagggtgcaaggaagtttagtgagcatttctgaggaaagcctgagcacacagagtagattaactatgccagagaatagccagggatattggggggtggggggtagtggagctgtcctgtttatgtagcatcaaagttggttttagagtactgaggatagttgaaccaagcctaattttttttttcactttaacaaaataatttccgtcttttcaataaattggccagactattttgacctaagattataaagagttttcctgacaacctagcagtcacttaacagatgtcgattgcacattagttttgtcaagacacctttataacaaagggaaatgcacacacttcatccaaaaggacattgtggttacagttaggaagaaaacacttaagatggaattatccatgtaagtgtaagttgtttatattacagacaacaaaagaaaatagctcccaagctttgagcactgaagatctcagaggaaggactccttaggtgccaatcgtctagcaagcatgcatacataggggacaagttaagagtcttaccgggttgagtaagaaaaggaaattattgccatgcgagacagagcacgatgcagcaatgtggaggatgagcagacagctagcatgttgtaaggagctcagaacgggagagccttcctgcagtggcatcgggggagaatgcaaaggaaagtcttgaacagtccagtgagcctttgcctctggataaactgttgatacagggagacatttgctttaaacagtcttcacataaccaagccattcagtacttcttgaaactgacttcataacaggagtcattgtaagttccacagaaagcaagacgtatgtatttcagttcttgtcttgaccagcagcactccggaggcccagtgtccggtgccctccttgtatctgaagcaggggtaacagctctgctgtgggcctgtttccctctagtatttacctcaaggcttggaaatgtattttgaaagaccttcagtcaaacgaagtaaagcaaatgtcaagaaggataaaccactgttgtgtgttgatgtgtggtgtattgtgatgtaaataaaaaatatcgttgaagttttactttgtaaagattctggtaacacttgggtctccttgggaaagaaacaacacttgaccaaagcatttaagttttaggcaaattccataatatttcactcttagttataaaattatcatacatgagatgttgaggatctatatagattattcagattttatattccttatagattgactcaaatattccttaaaagattatatatgatgctcctatggcataaattgtaatgtttaatgttttgaaaattggttataggtattttttaagttcccataaagtgtttcttgtatttgtcattgtgaattatatgtaattctaatagatattgtttgctttagtcatttttgtctccttttcctatagtttcctgtgtgagtgattccatgtaattaattggacagtctatccacaggcaacaaatagaagtagtatttgtaattgcagcctgtgccagggactgtgttagactgattagtaacactatgaatcacccgagatcttaagtattgctataaagagaagactgaagatgagagagtaaagtattttcctgggattatatagttggtaaaaaagaatcatgatttaaactctggactttggataaaagtatcagtaattttcctcattgctagcagtcctcatgcaaggtctctggactaaagcgatgtattacctgcaaatgcttgagtttcatcccatacttatggcgtgaggtgagtgtggcagccagcatctctgtcctcctaggtaactggttagtgctgaacctcgagattcaccactgtcaggagctgtctctgcttagaatcacctggacagctggctgtcaacccacgttaagtaagaacatgtgggactagaattcagtcaacaataaaagctttcatcaggtggctaaaatgtgcagactctgtttgtactggcatgttggccatcactcacagatgcaactctagccagaatcaagaatggggcagatccagagcccagctcgctgagcttctgccccagatttcagaggcagagtaagaagtggaacagtgttttcctcccaggtgctcaggacaggctggtcaacttccagtcacatatgccatttagtaagtgcttcggcctgtgcagccattagtaaccaaatcatgggatagtgaatctaaaatactcttggataaaatttgtattagaattaaaaaaaaatgagggtcagaaaggtgaactaactccaacttagatgcccctcccctttattttggtctcaaatctgttttaatgtgtccacaacattaatcaaaaactgtattttttttttttcggagctggggactgaacccagggccttgcgcttgctaggcaagcgctctaccactgagctaaatccccaacccccaaaactgtattttaaaaatcagttcactttcatctttttttccttgggttttcagtaaagaccagaaggactgacagacagctagagaggttgtgtagacatccagatggggagagtgcattggacaatctgagaaatctattcaggtgctgcctaattccattagctttaagttagatacaagctgtttgtagtattttgggttttattgtgcaaataaacaatagaggcctttagtcccagcgttaggatgcagagatccatttct

SEQ ID NO: 1022 - DNA, 1686 bp, Rattus norvegicus
  Genbank Accession No. NM_022601
cctaagttgcttgtctgggccactggcaaattcttccttcccaggctagacacacaggctgagcaattggttccgaacccagaggaacccaggcgacgctaggtcacgtggccgactgcttacatgacctgcgggctgctgagcgtcactgtgacgttcaggagacctgcgaagtggcccggctacttccgtcacctgtgctgtcggggtgctgtcatggacctgggaccgatgcgcaagagttaccgcggggaccgagaggcatttgaggaggctcatctgacctctctggatcccatgaagcagtttgcttcctggttcgaggaggctgttcaatgtccagatataggagaagccaatgctatgtgtctggctacctgcaccagagacggaaaaccctctgcccgcatgctgctgctgaagggctttggcaaggatggcttccgcttcttcactaactacgagagtcggaaggggaaagagctggactctaacccctttgcctctcttgtcttctattgggagcccctgaaccgtcaggtgcgtgtggaaggcccagtgaagaaactgccggagaaggaggctgagaactacttccattcccggcccaagagcagccagattggggctgtggtcagtcgccagagttctgtgatccccgatcgggagtacctgagaaagaaaaatgaggaactggggcagctctaccgggaacaagaggtgcccaagccagagtactggggtggctacatcctatatccccaagtgatggagttctggcaaggccaaaccaaccgcctgcatgaccgtattgtcttccgtcgaggcctggcaacaggagactcccctctgggacccatgacccaccacggggaggaagactgggtgtatgagagacttgcaccttgacactggactccagaatgttgggggatcatcatagggaagagtgggggaagggaaggaaaaaaatggaagccaggtataccttctgtgtgtgtgtgtgtatgtgagacattgggtttaaacctcgctcacactaggtaacactttaccactgagataaagtcccagcattttttcttactaccttttattttaagactaagttgcttagtctggccctgaactcactgtgtatacatcccagacaagtcttggctttgagttcctcccctcagtcccttgagtagcagtattataggcttgtgccaccaggcccagttctagtcctgtttttaagaagcccattgcctttgttttttttttttttttttttcttcggggctggggactgaacccaggaccttcggcttcctaggcaagcgctctaccactgagccaaatccccaacccgcccattgcctttgcctttgttaacccttctacctgcatttctccaggactcaccctcaagttctctgaactcgggatcggtttagtggctggaacagagcgcagtagtgttgtagagagtcacaagtagcaaagagtctcataattattcccttgattttgctcctggtttggggggacgcccgtcttgggagctgcagctggtctaactctgtttccagtaacagactaatcaggccgcagatatacaagggctcgctggctatggaaaggagccagaccatgtttgctgtgactcagacaaaccattatatgttctggttggccttg

SEQ ID NO: 1023 - DNA, 1468 bp, Rattus norvegicus
  Genbank Accession No. NM_022607
cgcccgggcaggtgtaccatggcggtctctctcctgctgcggggaggacgaatccgggcgctgaaggctgcccttctcgaggcaaaggtgttccgaggagaactggcttctacagtgcccctgtctacagagtccgagaataataaaaaggcggcaggaccaactagcaagacggaaagtgtgttcaaagatgtggtgggagcagaggagagggccaagctcctagacactcacacagcagcggcactgtccaaaagctcccctccacccagttcttacccatcagtggagaacacaggtggggctgtcgcaggcctgccgctcacagacttgtcaagaaagactttggtagcgtttcctcagaaagttacgcctccaccgcatgcctgggcttctgactcggaggctcggcggcatgtccagaaagtgacgaaagattcatcttcatcttcctcatccagctcctcagattcagactctgatggggaggaacatggctccgacattggtccccgagtggcaagcaaaagcaaggcagggttttccaaacctgaggcttctcgtccctcgaagaacggagcccctaagatcacagtttttgcaaaagagaaggccaaggtgcagaagccacacacagatgtcacctacccagagaagcccctgcagcctaagaagaaagggactttcaccaagcctgtagaagatagtaaagaaatcaggtccaagctcatgacatccaagccacagtccagtgaggttttggagcaaaaaatgaaggaaaaacagcaccagggaaaacggagaccagacaagacaggaaaggaaagcacagagctgtttgaagctgaaggaattttacccggccacaggaaagccagagtttccacacagcccacaaccggaacacaagaggccagcgcagaactccggccagccgctgcccccgagtcgggagctagacaggaagccaaagggccagagctcgaatggaagaccgcttctcccctggtcagaaaagaaagcctggagaagcaggtgccagaagggagcttccaggcggaggaggagacctcaggagatcagacactagggagatattcgaagacagttcctgttgaggagaaaaatacctttggagagagagctggaccacaactggaggggacgttccaggcgccagccggcgaagccccgcccactgatgcaggcccaccccaggaagccccaggcgacacacaggagcccacactggttcccgagtcgagtgacaccaccacctacaagaacctgcagcatcatgagtacaacgcattcaccttcctagacctgaacctggacctctccaagttcaggctgccacagccgtcttcgggacgagagtcgccccggcactgaactcaactcagggtagacccccgtgtggtcccttgaattcttgcctgtgagaataaaagtcagaggcacaaat

SEQ ID NO: 1024 - DNA, 470 bp, Rattus norvegicus
  Genbank Accession No. NM_022643
ctgttttgagacgttggagtggacaaacttatttttccacgatgccggaggtgtcggcaaaggggactactatttccaagaaagggttcaagaaagcagtcaccaagacccagaagaaggagggccggaaacgtaagagatgccgcgaagagagttactccatctacatttataaggtgctgaagcaagtgcacccggacaccggcatctcttccaaggccatgagcatcatgaactccttcgtgacagacatcttcgagcgcatcgcgggcgaggcatcgcgcctggcgcattacaacaagcgctcgaccatcacgtcccgggagatccagacggctgtccgcctgctgctgcccggggagctggccaagcacgctgtgtccgagggcaccaaggcggtcaccaagtacaccagctccaagtgagcccacagagctcacaacagacccaaaggctcttttcagagccac

SEQ ID NO: 1025 - DNA, 811 bp, Rattus norvegicus
  Genbank Accession No. NM_022674
gccttttctctgccttgcttgcttgagctccagcacagtccgagatggctggcggtaaggctggaaaggactccggaaaggccaagacaaaggcggtttcccgctcccagcgagcgggcttgcagttccctgtgggccgtattcatcgacacctgaaatctaggacaacaagccacggacgtgtgggcgcgaccgcagctgtgtacagcgcagccatcctggagtacctcaccgcagaggtacttgagttggcaggaaatgcatcaaaagacttgaaggtaaagcgtattacccctcgtcacttgcaacttgctatccgcggagatgaagagttggactctctgatcaaggctacgattgctggtggtggtgtcatcccacacatccacaaatcactgattgggaagaaaggacaacagaagactgtctaaggatgcctggattccttgttatctcaggactctaaatactcttaacagctgtccagtgttggtgattccagtggactgtatctctgtgaaaaacacaattttgcctttttgtaattctatttgagcaagttggaagtttaattagctttccaaccaaccaaatttctgcattcgagtcttaaccatatttaagtgttactgtggcttcaaagaagctattgaatctgaagtggtgggttttgattgagttgactgtttttaaaaaactgtttggattttaattgtgatgcagaagttatagtaacaaacatttggttttgtacagacattatttccactctggtggataagctcaataaaggtcagatcccaaactaaaa

SEQ ID NO: 1026 - DNA, 619 bp, Rattus norvegicus
  Genbank Accession No. NM_022676
gcggccatggagcccgacaacagtccacggaagatccagtttacggttccgctgctggagcctcacctggacccggaggcagccgagcagattcggaggcgccgccccacccctgccacacttgtgctgaccagcgaccagtcatccccagaagtagatgaagaccggatccccaacccacttctcaagtccacactgtcaatgtctccacggcaacggaagaagatgacaaggactacacccaccatgaaagagctccagacaatggttgaacatcacctagggcaacagaaacaaggggaagaacctgagggagccactgagagcacagggaaccaggagtcctgcccacctgggatcccagacacaggctcagcgtcaaggccagatacctcggggacagcacaaaagcctgcagaatccaaacccaagactcaggagcagcgtggtgtggagcccagcacagaggacctttcagcccacatgctaccactggattcccaaggagccagcttggtctgacagaagttgacatccggggatcgccagtgagtgtggaagttcatggacactggatgtttcttaatctcttgtttttaaacgtgataaatttggtgtt

SEQ ID NO: 1027 - DNA, 4131 bp, Rattus norvegicus
  Genbank Accession No. NM_022951
ctcggagaaagacaggccggccatcaggaaaacaaacaagcctcagcaacatctaaacccttgaaaggatcctgagagaggggggaaagggaaaacagcagccaccagcccaaccacttgtgtcttctgcccctccccacctatcttgcccaccccaccagcccacgctgcttgggacttgaaatctgtggccgaaggaccgtcaccacataacttcaaaaataatcaaccaccctccctacccaaacccacccaatctcactcatccagcatttcctttttggagtccactcagaatttttttcaacgaccccctctccctaatggagttgggtggggggaaaatgaaaactgagttggtctttacttttttaagagactttttgatccaatgaggccccacaagtaactgagtttgggtcctggttggttgttttattttttttcctccaaaattttacccctcccccctgagcccgaggtgctgacgtcgcaaaaaaattggataaagccaccatcatgggttcaggacccatagaccccaaagaacttctcaagggcctagatagcttccttactcgggatggagaagtgaagagtgtggatggaattgccaagatcttcagtctaatgaaggaggcacgaaagatggtgagtcgatgcacgtacttgaatattatcctgcagacccgggcgccggaggtgctagtcaagtttattgacgtcggcggctacaagcttctgaacagttggttaacgtattcaaagacgaccaacaacattcctctcctacagcagattctgctgactctgcagcacctcccactgactgtggaccacctcaagcagaacaacacagcgaagctagtgaagcagctcagcaagtcaagcgaggacgaagagctccggaaattggcatcagtccttgtcagtgactggatggctgtcatccgctcccagagtagcacccagcctgcagagaaagataagaagaaaaggaaggaagaggggaaaagtcgaaccacgcttcctgagcggcctttgactgaagtgaaggctgaaacccgggctgaggaagccccagagaagaagaaggagaagcccaagtcacttagaactacggcacccagtcatgccaagttccgttctactggactggagctggacaccccatctttggtgcctgtgaagaagaactccagcactgtggttgtgtcagacaagtacaacctgaagcccatccccctcaagcggcagagtgccacagctgctccaggcgatgctgccccgcctgcagagaagaagtacaagcccctcaacacaacccccaataccaccaaagaaattaaagtgaagatcatccccccacagcccatggagggcctcggttttctggatgctctcaattccgcccctgtcccaggcatcaaaattaagaagaagaagaaggttctatcacctactgctgccaagcccagcccttttgaagggaaaacaagcactgagccaagcacagccaaaccttcctccccagagcctgcagcccccgctgagcccatggacacagaccgtcctggcacccctgtccccgctgtggaagtcccggagctcatggatgcagcctcttcggagccaggagctctggatgcaaagcctgtggaaagccctggagatcccaaccagctgactcgaaagggcagaaagagaaaaactgtgacgtggcctgaggagggcaagctgagggagtatttctacttcgaactggatgaaactgagcgagtgaatgtgaacaagatcaaggactttggggaggctgctaagcgtgagatactgtcggaccgacatgcttttgagacagcccggcgactaagccatgacaatatggaggagaaagtgccctgggtatgtcccaggcctctggttctgccctcacctcttgtcatccctggaagcaacagccaggagcgatacatccaggctgagcgggagaagggcatccttcaggagctcttcctgaacaaggagagtcctcacgagcctgatcctgagccgtatgaacccattcctcccaaactcatccccttggatgaggagtgcgccatggatgagactccgtatgttgagaccctggagcctggagggtctggtggctcacctgatggagcaggaggctccaagctgcctccagttctggccaatcttatggggagcatgggagcagggaagagcccccagggccctggaggcggtggcatcaatgttcaggagatcctcacttccataatgggcagtccaaacaaccacccttcagaggagctgctgaaacagccagactactcagacaagctgaagcagatgctggtgccacatgggctcctaggtcctggtcctgtagccaatggcttcccaccaggaggccctgggggccccaagggtatgcagcatttcccccctggtcctggagggcccatgccaggtccccatggaggccctggtggaccagtgggtccacgtctcctgggtcccccaccaccttctcggggaggtgatccattctgggatggcccaggtgaccccatgcgaggtggcccaatgcgtgggggtccaggacctggtcctggaccataccacagaggccgagggggtcgtggaggaaatgaaccgccaccaccccctccattccgaggagccagaggaggtcgttctggaggaggccccccaaatggccgagggggtcctggtggaggtggcatggttggaggtggtgggcaccgcccccatgaaggccctggagggagcatgggcagtggacatcggtctcatgagggccctggagggagcatgggcagtggacatcggtctcatgaaggccctggacacgggggaccccatggccaccggccacatgacgtccctagccatcgaggccacgaccatcgagggccaccacctcatgaacaccgcggtcatgatggccatgggggaggcggccaccgagggcatgatggaggccacagtcacggaggagacatgtcaaaccgccctgtctgccgacacttcatgatgaagggcaactgccgctatgagaacaactgtgccttctaccacccaggggtcaacgggcccccactgccctaggcctgcctgccctacccgcacccctgtggactgcagctttgctccttccacttggttatggcttctgtgaggcccactttccttttccccagctgatgaggagccggccccctcagttcccacctggttgggtttctgggggtttctgattcctggtgtgcattgatgtacatattccctccagtctggagcggagaggagagagactggactgctgagacggctggcttcactttgtgaggagatttgccctgtgccccaaaccccttccagtattagccccgatgcctgagaacctgaagccggccaccctggagacctctgctctccacatgcacacggaactgagttggtcagctgcacttaggaaaccgtccaagctaagctcattatcttcacagggtgagggggtggtgaggggtaccatatatcccactgcactgagggctcaagctggctgaagctgagttctggaactaccccccacttgtgccccacatgggccagtcactgttgagtcctttctcaagaaggactgcaactgttacttcccaggtcatcgtgggtctgctaggttcagtgatggcacattcatatctgtgtccagtggaagttgtatctggcagaggggtggcctgtagtgttgggccactcttgcctacagccattttcgagactccgtgaggccagctttcattaactttagccgggtataccgggcctgacgcactacatgcactgcctttgggagtgggctggctccttaccccgtaaggagccctgtcagtgaggcttcctgggtagactcagcaggaggggcccttcccagtcctctcctccccctgtcttggcatcagttgttttctatgaaaacagtgggttggttttgtgcagggtcttgggttagaaccaatggatttgaggagttttttcttttggttttgtatattttgtacattaataataaacagtggaaagagaagcagctcattt

SEQ ID NO: 1028 - DNA, 797 bp, Rattus norvegicus
  Genbank Accession No. NM_022952
  misc_feature (1)..(797): n = a or c or g or t
agccctgggccccacaactgcaagcagagccggagccgcccagttacagcgggacccgggcctctggggtccanacaggggtcgccatgatccgattcattctcatccagaaccgggcaggcaagacacgcctggccaagtggtatatgcagttcgatgatgacgagaagcagaagttgatcgaggaagtgcacgccgtggtcaccgtcagggatgccaagcacaccaactttgtggagttccggaacttcaagatcatctaccggcgctacgctggcctctacttctgcatctgcgttgacgtcaacgacaacaatctggcctatcttgaaggcatccacaacttcgtagaagtgttaaatgaatacttccacaatgtctgtgaactggacctggtgttcaacttctacaggttttacacggtggtagatgagattttcttggcaggagagatccgagagaggagccagacgaaggtgctgaagcagctgctgatgctgcagtcgctggagtgagggggggcttccgccccagcccggcntgntgggccaacatgcntgtttgtcccctgccaggtttgaggcccaccccagcagccccttccnttctttagntggcccagaggagtgacccagcagggtttaggccacaggggaggaggccagaacccactgcctttgggccctaagtggatggcagaggccaccgtgatgtcccgagtaactgtgccattattgtgtgatgctgtgagtgtgcgtgtgtgcagcccccaataaacctgtggtcctgcctgnaaa

SEQ ID NO: 1029 - DNA, 1408 bp, Rattus norvegicus
  Genbank Accession No. NM_024125
acgggaccgggacgcagcggagcccgcgggccccgcgttcatgcaccgcctgctggcctgggacgcagcatgcctcccgccgccgcccgccgcctttagacccatggaagtggccaacttctactacgagcccgactgcctggcctacggggccaaggcggcccgcgccgcgccgcgcgcccccgccgccgagccggccatcggcgagcacgagcgcgccatcgacttcagcccctacctggagccgctcgcgcccgccgccgcggacttcgccgcgcccgcgcccgcgcaccacgacttcctttccgacctcttcgccgacgactacggcgccaagccgagcaagaagccgtccgactacggttacgtgagcctcggccgcgcgggcgccaaggccgcaccgcccgcctgcttcccgccgccgcctcccgccgcactcaaggccgagccgggcttcgaacccgcggactgcaagcgcgcggacgacgcgcccgccatggcggccggcttcccgttcgccctgcgcgcctacctgggctaccaggcgacgccgagcggcagcagcggcagcctgtccacgtcgtcgtcgtccagcccgcccgggacgccgagccccgccgacgccaaggccgcgcccgccgcctgcttcgcggggccgccggccgcgcccgccaaggccaaggccaagaaggcggtggacaagctgagcgacgagtacaagatgcggcgcgagcgcaacaacatcgcggtgcgcaagagccgcgacaaggccaagatgcgcaacctggagacgcagcacaaggtgctggagctgacggcggagaacgagcggctgcagaagaaggtggagcagctgtcgcgagagctcagcacgctgcggaacttgttcaagcagctgcccgagccgctgctggcctcggcgggtcactgctagcccggcgggggtggcgtgggggcgccgcggccaccctgggcaccgtgcgccctgccccgcgcgctccgtccccgcgcgcgcccggggcaccgtgcgtgcaccgcgcgcacctgcacctgcaccgaggggacaccgtgggcaccgcgcgcacgcacctgcaccgcgcaccgggtttcgggacttgatgcaatccggatcaaacgtggctgagcgcgtgtggacacgggactgacgcaacacacgtgtaactgtcagccgggccctgagtaatcacttaaagatgttcctgcggggttgttgctgttgatgtttttgtttttgttttttgttttttgttttttttttggtcttattatttttttgtattatataaaaaagttctatttctatgagaaaagaggcgtatgtatattttgagaaccttttccgtttcgagcattaaagtgaagacattttaaaaaaaaacggcacgag

SEQ ID NO: 1030 - DNA, 711 bp, Rattus norvegicus
  Genbank Accession No. NM_024127
gggactcgcacttgcaatatgactttggaggaattctcggccgcagagcagaagatcgaaaggatggacacggtgggcgatgccctggaggaagtgctcagcaaggctcggagtcagcgcaccataactgtcggcgtgtacgaggcagccaagctgctcaacgtagacccggacaacgtggtcctgtgcctgctggctgcggatgaagatgacgaccgggacgtggctctgcagatccatttcaccctcattcgtgctttctgttgcgagaacgacatcaacatcctgcgggtcagcaacccgggtcggctggcagagctgttgctactggagaacgacaagagccccgctgagagcgggggcctggcgcagaccccggacttacactgtgtgctggtgacgaacccacattcatcacaatggaaggatcctgccttaagtcaacttatttgtttttgccgggaaagtcgctacatggatcagtgggtgccagtgattaatctccccgaacggtgattccccgaacggtgatggcatctgaatggaaataactgaaccaaattgcactgaagttttgaaatacctttgtagttactcaagcagtcactccccacgctgatgcaaggattacagaaactgatgtcaaggggctgagttcaactacaggagggctaggagatgactttgcagatggacagagaggtgaaaata

SEQ ID NO: 1031 - DNA, 628 bp, Rattus norvegicus
  Genbank Accession No. NM_024131
tgaattcctggaacctcaactggctcccactgctctctcggtgcagttaccgtttggcgatccctctcctgctaacatgccgttcgttgagttggaaacaaacttgccggctagccgcatacccgcagggctggagaaccggttgtgtgcggccacagccaccatcctggacaaacccgaagaccgcgtgagcgtgacgatacgaccgggcatgaccttgttgatgaacaaatccacagagccctgcgcccacctcctgatctcttccatcggtgttgtgggcaccgcggagcagaaccgcagccacagctccagcttcttcaagttcctcaccgaggagctgtccctggaccaggacaggatcattatccgattcttccccttggagccctggcagatcggaaagaaaggaactgttatgacgtttctgtgatggagacaaggaacgcagggcgtttgcttgagcctgtccagagcccttccagagaggcctcctggcagatacgataccagatccctcttttgcataagtgtctgtgatctcactgacctgttttcctctcccccagcctcgtgaacgagagagcaataaagaagagagcataatcccaaaaaaaaaaaaaaaaaa

SEQ ID NO: 1032 - DNA, 9731 bp, Rattus norvegicus
  Genbank Accession No. NM_024137
ccgccggcctgcggccgagcgagcgcggcggaggcgctggcgctgggcaattcggtgactcctttctcctccggagcgaggaaggaaggaaggagagaaggaaggaaggaagcgaagaaggaggggactgtctccatggaaggttcaggcggaggcgccctcgccttgcgggtgcaccggccgcagagcagttccagccgccgccggctggcccccggcgcgtggagacgggtgaagtccctgagttttgtcaaagccaacgataatcagatctacttgaaagattaagtgaattgatttgattggaacattctctcaacagccagccaataggaagtgtcaggacaatcatgcccatgagaactctcaactgttcaggtgattgcacttcagtgaaactggctgttgaacattgctggagttgatgggcagaatttctcctggactattcatcatcccagtcccatcctagttgagagagatttaaatgccataagaatcctttgtaacgttgcactttgcttttgaagatggacatttctaggatggagagaactgttatagtttggttccaggacattggcatccaatgcccactgactccagtgtgagcctggaaggttccagagagagagggaacaatccacgcgtttgcagacgaccaggaacgcagaagcaacccagctttacaaagcacagcgttggagacacctccatgagtctgcttggcttccgggcaaagtagcacttaagaccttgtgttaaaatggacactggggacacagctctaggacaaaaagctacctcaaggtctggagaaactgacagtgtgtcaggtagatggaggcaggaacaatcagccggtcttaagatgagcactttcagcagtcaggaagggcagagacaaccgcaaatagatcctgaccagatcggaaatgtagcttcagctcagctgttcggttctgggaagctggcctcgcctggcgagggcgtacatcaagtcacagagaagcaatacccaccacaccgtccgagtccctacccatgccaacattcgctctctttccctcagcactcattgccccagggcatgatgcacagcaacaagccgcaccagagcctcgagggccctccctggctcttctctggccctttgccatctgtggcctctgaggacttatttccttttccaatgcacggccacagtagtggttaccctagaaaaaagatctcaagtctcaaccccgcttacagccaatactcccagaaaagtatcgaacaggcagaagatgctcacaaaaaagagcacaaacccaaaaagccgggcaaatacatctgcccgtactgcagcagggcatgtgcaaaaccaagtgtcctgaagaaacacatcaggtcccataccggtgagcggccgtatccgtgtataccttgtggtttctctttcaagacaaagagcaatttgtacaagcacaggaagtctcatgcccacgcaattaaggcaggcttggtacccttcaccgaatcatctgtgtctaagctggacctggaggctggctttattgatgtagaagcagagatccactcggatggtgaacagagcacagacacggatgaggagagctctttatttgctgaggcttctgacaaagtgagccccggccctcccatccctttggacattgctagcagaggtggctaccccggatccttggaagaatccttgggaggtccgatgaaggtgccaattttgattatccccaaaagtgggatcccgctacccaatgagggctctcagtatctgggccctgacatgctcccaaacccgtctttgaatgctaaggccgatgactctcacacagtgaaacagaaacttgcactgagactgtcagagaaaaaaggacaagactctgagccatccctcaaccttctgagcccacacagcaaggggagcacagactctggctacttttctcgctcggaaagtgcagagcagcagataagcccacccaacacaaacgcaaagtcttacgaagaaatcatctttgggaagtactgtcgactgagtcccaggaatacactcagtgttacccccacgggtcaggagcgtaccgccatggggcggaggggcctcgtggaaccattacctcatgtaaacaccaggttggaggtcaagatgtttgaagatcccatcacacagctgattcccagcaaaggagaaatggaccccagtcaagtcaacatgttgaagaccacgaagttcaacagtgagtgtcggcagccacaagccatggcggcatctgttaggaatgaaggaaaaccttacccaggaagtttcccaggcagcaatcccattctcttagaagctcccgtggactcttcaccccttattagaagcaactcaatgccaacttcttcagcaactaacttaagcatccctccttctttgagaggaagccactcgtttgatgaaaggatgacgggctctgatgacgtgttctatcccggcactgtaggcatacctccccagcgcatgcttagacgacaggcagccttcgagctgccatcggtgcaagagggtcacatggagtttgagcaccctgcaagggtacccaagatccttgccggctcatccctgaaggaaaagaaattagttcccggagataggtctggctatgactatgatgcctgccgtaaaccgtataagaagtgggaagaccctgaaacaccaaaacagagctacagagatatctcttgcttgagcaccttcaaacatggaggggaatattttatggacccctcagtgccattgccgggagtgccaaccatgttcgggacgacctgcgagaacagaaagcgcaggaaggagaaaagtgtaggggacgaggaggatacgcctatgatctgtggtggcatggggagtgctcctgggagcatgatgtcctcagagtatgactccaagctgcaggacggaggaaggagtggcttcaccatgactggacatgagagtcttcctcatggttactccgatcgtttagacctggcccggccccagctgccgtctagaagtccgtctcttgggtctgaggatttgccctcggctggtgatcctgacaagatgacagacctgggcaagaagcctccgggaaatgtgatttcggtgattcagcacacaaactcgctgagccggcccaattccttcgaaaggtctgagtcaacagaaatggcagtcagtacacaggacaagaccccctcaccttctgagatgggcgacagtgaggttttggaaggccccgtaagcccagagtgggctcctccaggggatggtgcagagagtggaagcaggccaaccccttcacagcaggtacctcagcactcctaccatgggcaaccaaggcttgttcgccaacacaacatccaggtccccgaaatcagagtcacagaagaacctgataagcccgagaaggagaaggaggctcctaccaaggagcccgagaagcctgtggaagaattccagtggccccagagaagcgagactctttctcaactccctgctgagaagttgcctcccaaaaagaaacgcttgaggctcgcagatatggagcactcctcaggggaatccagtttcgagtccacaggcaccggcctctctcggagtcccagccaagaaagcaacttatcccacagttccagtttctccatgtcctttgacagagacgaaacggtcaagctcaccgcacctcccaagcaggatgagagcgggaagcattccgagtttttgactgtccccgcgggttcatactcattgtctgtcccgggtcaccaccaccagaaagaaatgcggcgttgctcctctgagcagatgccctgtcctcacccgacggaagtcccagaaatacggagtaaatcatttgattatgggaacctgtcccatgctccagtggcgggagcatccccatcaacattatcgccatcccgggagaggaagaaatgctttctggtacgccaggcttccttcagtggctccccagaaattgcccaaggtgaagccggcatggaccccagcgtcaagcaggagcagctggagcagctgcatgctggcctcagggctgcatggaccactgtgctcccacccctgccaggggatgacccagggaagcaggtggtcggtccttgtggccagctgagctcagggccaccgctccaccttgcccagcaacagatcatgcacatggacagtcaggaatctctgagaaatccgttgattcagccaacatcctacatgacaggcaagcacttacccgaacaaccgcacctgtttccacatcaagacgcggtcccgttttctcctatccagaatgccttgtttcagtttcagtacccgactgtctgtatggttcatttgccagctcagcagcctccctggtggcaggcgcatttcccccatcccttcactccacaccctcagaacagctacagcaagcctcctttccaagctgacattcattctagctattccttagagcacgtagcagaacacactggaaagaaatctgctgactatccgcatgcaaaagagcagacttacccgtgctattccggagcatcagggctacactccaagaacctccctccgaagtttccatcagaccctggcagtaaatccactgaggctccgcccactgaacagcttcttcgagaagattttgcctcagaaaatgctgggcctttgcagtccctaccgggaacggtggttcctgttcgcatccagacccacgttccatcctatggaagtgtcatgtacacaagcatttctcagatacttggacagaatagccccgccattgtcatatgcaaggtcgatgagaacatgacccaaagaacactggtaaccaacgcggccatgcaagggataggatttaacatagcccaagtgcttgggcagcgcacaggcttggaaaaataccctctttggaaagtacctcagaccctacccctgggcttggaatcctccatccccttgtgtttaccgtccacctcagacagcgcggcctctctcggaggaagcaagcggatgctgtctccagccagcagtttggagctcttcatggaaaccaagcaacagaaacgggtgaaagaggagaagatgtacgggcagattgtagaagagctcagtgctgtggagttaaccaactcggacatcaagaagggcctctcccgcccccagaagccccagctcgtgaggcaagggtgtgcctcggagccgaaggacggcagctctcagtcaaggtcatcttccttctcctccctgtcaccctcctcgtctcaagaccatccggctgccagcgggcctttccctcccaacagggagatactttcaggttccagggcgccgccgcgacggaagttcagtgggccctcagaaagcagagagtcctccgatgagctggacatcgatgagacctcgtcagacatgagcatgagcccccagagctcttcgctgcccacaggaggcagtcagcaggaagacgaagggaaggcccgcaagctgccagtcagcatgctagtccacatggcctctggtccgggaggaaatgtggcaaattccactcttcttttcacagacgtggcagatttccagcagatccttcagttccccagtctgcggacaacaactactgtgagttggtgcttcttaaattatacaaaacccaattttgtgcaacaggccaccttcaaatcctccgtttatgcttcatggtgcattagttcctgtaacccaaacccatcaggattgaacaccaagaccacgctggccctcctgagatccaaacaaaaaattaccgccgaaatttacactctggctgctatgcacaggcccggaactggcaagctcacatcatccagtgcctggaagcagtttgcacagatgaaacctgatgcacccttcttgtttggcaacaaactagaaaggaaattagggggaaatgtcttaaaggaaagagggaaaggagagattcacggagataaagatcttggatccaaacaaaccgagccaatccgaattaagatctttgaaggggggtacaaatccaatgaagattatgtgtatgtcagaggacgtggacggggaaagtacatttgtgaagagtgtggaattcgctgtaagaagccaagcatgctgaaaaaacatatacgcactcatactgatgttcggccttatgtatgcaagttatgtaattttgccttcaagacgaaaggaaacctaacgaaacacatgaaatctaaggcccacatgaaaaagtgtctggagctgggcgtctcgatgacatcagtagatgagacagaaacagaagaagcagaaaatatggaagatttgcacaaaacatctgagaagcacagcatgtccggcatttcaactgaccaccagttctcagatgctgaggaatctgacggagaggatggagacgataatgatgaagatgatgaagacgatgatgactttgatgaccaaggagatttgacacccaaaacaaggtcaagaagcaccagtcctcagcctcctcggttctcctccttgcctgtcaatgttggcgctgtagcccacggcgtcccctcagatagctctctgggacattcgtcattgatcagctatttggttactctacccagtattcaggtcactcagctcatgacacccagtgactcttgtgaagacacccagatgacagaatatcagaggctgttccagagcaaaagcacagactccgaacccgacaaagacaggttagacatcccaagctccatggacgaagaggccatgttgtcttcagagccaagctcctccccaagggacttctccccctcaagctaccggtcctcaccaggatatgattcttcaccctgtcgagataattcgccaaagaggtatctgatacccaaaggagatttgtcacccagaagacatttatcacctagaagagatctatcacccatgaggcatctgtcaccaagaaaagaagctgcattgaggagagagatgtcccaaggggatgcttcaccaaggaggcatttgtccccacggagaccattgtctcctggaaaagacattacaacaagaagggacctctctcccagaagagagagaagatatatgactaccattagagcaccatctcccagaagggctttataccataacccaccattaccaatggggcagtatctgcaaacagagccaattgtattggggcctcctaatctaagaagaggattacctcaggttccttacttcagtctctatggagaccaagaaggtgcttatgaacatcacggctccagccttttccctgagggtcctactgactatgtcttcagtcatcttcccctccattctcagcagcaagtgcgagctcctatccccatggtgccagttggtgggatccaaatggttcactccttgccgccagccatttccggtttacatcctccacccacattgcctctgcccacagagggctctgaggagaagaaaggagcacccggggaggccctcacccaggatccctacaccctttccaggcggcatgagaaacaagcccctcacgttttgcagtcatctggtctacctagttctccctcctccccacggctattgatgaaacagagtacttcagaagacagcctaaattccacagagagagaacaggaggaaaacatacagacttgtacaaaagccatcgcctcactccggattgcaacagaagaggcagctctgcttggggctgatcagcccacatgggtgcaggagtccccgcagaaacccttggagagtgcacacatcagcattagacactttagcgggcctgagccaggtcagctctgtacctcagccgcccaccctgacttacacgatggtgaaaaggacacttttggtacatcacagactgcagtagcccaccccacgttttacagcaagggcagtgtggatgagaagcaggtggactttcagagcagcaaggaattatctttaagcacagaggaaggcaatgagccctcatcggaaaagaatcgactccattgatctgcaatgcatggacacattcatttccacatttccccctccccccttttgtttttgtttttctagggatagaaataaacgagttgatagcatgcctgtcctaagttacagtagttggctattataaatacttttgttattttgaagacaattagggaaattaacaagtcatcttgagcctgaccaaaacaaaatttgaaattaacctattgggtctggtaactttgaaaaaaattgtacagatgtttgtgccttttctttactttgcttatattcttataagcatttttttagcggtaatttgtacatattttagaatttgtgtatctgctttgtaataaatgtaatctctttcctcttttggacacttggatcttaacgacgtaaagcaaagcagcatctatatatattgtgaggttgcactaaaacatatttttatatgataaaactgaacagcttttatgtacagctctcattctgtaatactaatatttattttgtttcataaactgtacatttttttcttaatgttgtggattgcttttctatgtgaagcatgggttccctgttgcgtaactagaacagaaatgtccattgtaagcaagatatttaaactagaatatcttattctgcacttatgcataagttacaaaaaaaagataaagaacgtatcagtcggttcttaacctgtaaattctttttgtctcttgtttgccggattgacaataacttaagagctgattgtgatttttaaatggatagtaccgtaaagcattaaagtaaacaatgtgctattgtgagtttttttcaaagctttataaatcagttataaataatattaaaagtatttggtcttatgtgaacatgttgatctatatactcaccttaaaaaatatgggaaaaacattccgcccccatgtaaatatgtacaagtgcatcactggtacagttttgtgttactcggttggacacgaggttgccacagacctatgctagagtgtctttaaaattaaagtgagaaagcacatggactgtgtagagcttggttatcggccggcccggtggcttggtaggcagtgctgtgcgctgcctgtggagaagacctgggcttaaaaatcttggttcttgctgcacaggatggtgactggaactaaggctgcatggagggttcgcacttggactcgagggttgggtgtggaagtggggaagagggatggagacctgctccccagctcttcccatcagcctgtccataatggttacagggttaccatcagcattaggaaatgtcaccttaccctttgaatagggaaagagtgtcactcctggctgtctcagggggaatgaagcagagaggccttcaaaagaaagcagctctggggagaaggaagtttttttgtatctaaccttcagaacggcttttgatcagtgttgaaggtgggaagagcctttgcaggtctagaagagcagagcagagggaggggtacagcaacatgtgcacacgcatgcacatgtatgtgcatgcgcacacacaatctgggttatctttgtgctatatagtggattataattctgtgaaaccaagtttgtatattgaattacattaaggagtgttctttaaaaagagaaataaatatacaattacatgctt

SEQ ID NO: 1033 - DNA, 1213 bp, Rattus norvegicus
  Genbank Accession No. NM_024148
agacagactccattctttgtgcagtgaggggctccctgcctcgttgggaggcagcgtagtaaacactgcttcggtgctccagacgcctaagggctttcgttacagcgatgccgaagcgggggaagagagcggcagcggaagacggggaagaacccaagtccgagccagagaccaagaagagtaagggggcagcaaagaaaactgagaaggaggccgcaggagagggccctgtcctgtatgaggaccctccagatcagaaaacgtcagccagtggcaaatctgccacactcaagatatgctcctggaatgtggatgggcttcgagcctggattaaaaagaaaggcttggattgggtaaaggaagaagcaccagacatcttgtgcctccaagagaccaaatgctcagagaacaaactcccggctgaactgcaagagctgcctggactcacccatcagtactggtcagctccatcagacaaagaaggatatagtggtgtgggcctactttcccgccaatgcccgctcaaagtctcttatggcattggtgaggaagaacatgatcaagaaggccgggtgattgtggctgaatttgagtcctttatcttggtaacagcctatgttccgaacgcaggaaggggtctggtaagactggagtaccgacagcgatgggatgaagccttcagaaagtttctaaaggacttggcttcccggaaacctcttgtgctgtgtggggatctcaatgtggctcatgaagaaatagaccttcgtaaccccaaaggaaacaaaaagaatgctggttttactccccaggagcgccaaggctttggggaaatgctacaggctgtaccactggctgacagcttccggcatctctaccccaacactgcctacgcttatactttctggacttacatgatgaatgcccgctctaagaatgttggttggcgccttgattactttttgctgtctcactctcttttacctgctttgtgcgacagcaagatccggtccaaggctcttggcagtgaccactgtcccatcaccctttacctagcactgtgacactcccctcaagtagcttcatgctgggaaatagcctcctctcctccaggagaccagtgcgttatctcttcttcaggtgtttactcccctctaaaccaaacttctggtttcctttaaacaatccaagtgaaataaaagtcctacttttcaac

SEQ ID NO: 1034 - DNA, 995 bp, Rattus norvegicus
  Genbank Accession No. NM_024152
agcaggcacgttcgcgcaagccgggccgcagggcgtcctcgcggcggggcggctacttttcgggctcgcagcggcggcggcgttgtaggctgaggggacccgggacacctgaatgcccccggccccggctcttccgacgcgatggggaaggtgctatccaagatcttcgggaacaaggaaatgcggatcctcatgctgggcctggacgcagccggcaagacaacgatcctgtacaagttgaagctgggccagtctgtgaccaccattcccacggtgggtttcaacgtggagacggtgacttacaaaaacgtcaagttcaacgtgtgggatgtgggcggccaggacaagatccggccgctctggcggcattactacaccgggacccagggtctgatcttcgtggtagactgcgccgaccgggaccgcatcgatgaggcccgccaggagctgcaccgcattatcaatgaccgggagatgagggacgccataatcctcatcttcgccaacaagcaggacctgcctgatgccatgaaaccccatgagatccaggagaaactgggcctgacccggattcgggacaggaactggtatgtgcagccctcctgtgccacctccggggacggactctatgaggggctcacatggttaacctctaactacaaatcctaatgagcgccctccacccagcccccggaaggagagaaatcaaaaacccattcataggattatcgccaccatcatcacctctttcaattgccactctcttttttgaaactgaactcgagttactgttctaccgtttagtggggttgggggttttctttgttccccttaccccccctcttctatttcctttcggctttgcgttaggatgctctgatctgacatttgacacgaatacagtgctatatgctcttgtgacttccagcaaacggggtaatagcaactcttggtaaagtcctttataataatggttgattttttttttttatttc

SEQ ID NO: 1035 - DNA, 3170 bp, Rattus norvegicus
  Genbank Accession No. NM_024159
cccgtcatgtctaacgaagtagaaacaagcacaaccaatggtcagcctgaccaacaggctgcaccgaaagcaccatcaaagaaggaaaagaagaaaggttctgaaaagacagatgagtatctgttggccaggttcaaaggtgatggtgtaaaatacaaggccaagctaatcggtattgatgatgtgcctgatgcgaggggagacaaaatgagtcaggattctatgatgaaactcaagggaatggcagcagctggtcgctctcagggacagcacaagcaaaggatctgggtcaacatttccctgtctggcataaaaattattgatgagaaaaccggggtaatagagcatgaacatccagtaaataagatttccttcattgctcgtgatgtgacagacaatagagcatttggttatgtgtgtggaggagaaggccagcatcaattttttgctataaaaacagggcaacaggctgaaccattagtcgtcgatcttaaagacctttttcaagttatctataatgtaaagaaaaaggaagaagaaaagaaaaaggttgaagaagccaacaaagcggaagagaatgggagtgaggccctaatgacccttgatgatcaagctaacaaactgaagctgggtgttgaccagatggatttgtttggggacatgtctacacctcctgacctaaataatccaacagaaagcagagatatcctgttagtggatctaaactctgaaatcgacaccaatcagaactctttaagagaaaatccattcttaacaaatggagtcacctcctgttctctccctcgaccaaagcctcaggcatccttcttgcctgaaagtgccttttctgccaatctcaacttctttcccacccctaatcctgatcctttccgtgatgatcctttcgcacagccagaccaatcggcaccctcttcgtttcattctctcacatctgcagatcagaagaaagcgaatccgggtagcttgtctactccacagagtaaagggcccttgaacggtgatactgattactttggtcagcaatttgaccagatctctaaccggactggcaaacaggaagctcagggaggcccatggccctatccaagttcgcaaacccagcaagcagtgagaactcaaaatggggtatctgaaaaagaacagaacggcttccatatcaaatcttccccgaacccttttgtgggaagccctcccaaaggactatcggtaccgaatggcgtaaagcaggacttggaaagctctgtccagtcctcagcgcatgactccatagccattatcccacctccacaaagtaccaaaccaggaagaggcaggaggaccgctaagtcttcagcaaacgacctgcttgcttcagatatctttgcctcagaacctccaggccagatgtcccccacaggacaacctgcagtcccacaggcgaactttatggatctcttcaaaaccagtgctcctgccccaatggggtcggggcccctcgtaggtctaggtactgtcccagtaacacccccccaagcaggaccttggacacctgttgtcttcactccttctacaactgtggtcccaggagccataataagtggccagccttccggttttggtcagccactcgtctttggtacaaccccagcagtgcaagtttggaatcagccttcatcatttgcaactgcagcttcccctccacccccggcagtttggtgtcctaccacatctgtggcacccaacacttggtcatccacaagtcccctggggaatccttttcagagtagtaatatctttccaccttccaccatatccactcagtcctttcctcagcctatgatgtcctctgttctggtcacacctccccaaccacctccccgaaatggcccactaaaggacactcttagtgatgccttcactggcttagacccacttggggataaagaggtcaaggaagtgaaagaaatgtttaaggacttccagctgcggcagccacctcttgtaccctcgaggaagggggagacaccttcctctgggacctcaagcgccttctccagttacttcaacaataaagttggcattcctcaggagcatgtagaccatgatgattttgatgccaatcaactgttgaacaagattaatgaaccaccaaagccagcccccagacaaggtgtcctctcgggtaccaaatctgctgacaattcactcgagaaccctttctctaaagggttcagctcaacaaacccctccgtggtctctcagcctgcatcttctgatgcccacaggagcccttttggaaatccttttgcctaacttctttctgaagttgtaatgctgactgactatccagatgagcaaaaggctggctttggtcaaggattaagcagatagccagaaacgtgctgacctctgtccttgctccagctttgatgtattacctgttaccctacttgtctttgcctcatgtacttgtaaaaagcctttcactctctctaggctaaagctacactgaaacaatggctttacataaattaaactcctaagctctctagctccaatataaatgaagtagcttccctaccaaatccttgtctgtcgtgctcctagaaccttccagaatattctccgttttaccctcaatttgggaggtgtggccacctttacccttaatatcacactgccttgagtaaatgtccaaatccttgtagctctcaaggtcatttgtgattcctggtgtgcatcataaatctaaacattaatattaacattaataggaaagcaagacaccttgcttcccattcccactcagacaagtttttttatgataaaatgaaagcaagactaacttctcgaatccacccaaggaccatttcgagatggtctttctcagctaattgcatcatttaccaatcctactccaagtggtgtttacatttgacttgaaaaggagaaaggtctaactcaaaacataaggcattattcaaagctaataaaacaatttctccctggggccccacattgttttcattccagacactttgcagctgtttgaccctgatgatattatgccctacattttccttgaagattctgattttatttcatgtgattcttttttctcaataaagatgattattgtgtgcatttactaaacaaacaaaaaaaaaaaa

SEQ ID NO: 1036 - DNA, 666 bp, Rattus norvegicus
  Genbank Accession No. NM_024162
ctcacgaccgacatcgacctcctttctcattgcaccatggcggacgcctttgtcggtacctggaagctagtggacagcaagaattttgatgactacatgaagtcactcggtgtgggctttgccaccagacaggtggctagcatgaccaagccgaccacaatcattgagaagaatggggataccatcaccataaagacacacagtaccttcaagaacacagagatcagctttcagctgggagtagagtttgacgaggtcacagcagatgacaggaaggtcaagtcggtcgtgacactggacggaggcaaactggtccatgtgcagaagtgggacgggcaggagactacgcttacacgggaactaagtgatgggaaactcatcctgactctcacccatggcaatgtggtgagcactcggacttacgagaaggaggcgtgacctggctgccccgtcactgactgctcctctgccaatggctacccctaactcagcaccacgttgcctcatgtttctcccctctgacgttttatataaatactctttggttgggcttttcctggagatatgggacaccagcctggacccaggtcccattgtgtatgtggtttattttttaaatgtatccaaagggtgctccaaggtcaataaagcagagccaaggccacc

SEQ ID NO: 1037 - DNA, 1390 bp, Rattus norvegicus
  Genbank Accession No. NM_024386
gagactccgggcgaagatggcgacagtgaggaaggctttcccacagaggctggtgggcttggcgtccctccgggctgcgagcacctcctccatgggcaccttgccgaagcgggtgaagatcgtggaagtcggcccccgagatggtctgcagaatgaaaagagtatcgtgccgacgccagtgaaaatcaaactgatagacatgctatccgaagcagggctcccggtcatcgaggccaccagctttgtctctcccaagtgggtgccgcagatggctgaccactctgacgtcttgaagggcattcagaagtttcccggcatcaactacccggtcctgacaccaaacatgaaaggctttgaggaagcggtagctgcaggtgccaaggaagtgagcatctttggggctgcgtccgagctcttcacccggaagaatgtgaactgctctatagaggagagtttccagcgctttgatggggtcatgcaggccgcgagggctgccagcatctctgtgagagggtatgtctcctgtgccctcggatgtccctacgaggggaaggtctccccggctaaagttgctgaggtcgccaagaagttgtactcaatgggctgctatgagatctcccttggggacaccattggcgtaggcacgccaggactcatgaaagacatgctgactgctgtcctgcatgaagtgcctgtggccgcattggctgtccactgccatgacacctatggccaagctctggccaacacgttggtggccctgcagatgggagtgagcgttgtggactcctcggtggcaggactcggaggctgtccctatgcaaagggggcgtcaggaaacttggctaccgaggacctggtctacatgctgactggcttagggattcacacgggtgtgaacctccagaagctcctagaagccggggacttcatctgtcaagccctgaacagaaaaaccagttccaaagtggcacaggccacctgcaaactctgagccccttgttcacctaaaccggaactgtgggagttgggtgtacacaatgattcctggatggggaaatggaatgaaggcaaatgagccggcctcacagaggtccctctcctacatagaagggctagagctgccagcacgcccggaccagctccccagagctgcgtgcctaagcactgcttggctggccctgggtgagtccactagccagcagagctgacatccatgtgccacgaccgcgggtcccatgttctacctctgaggacagcagcgcctttgctgaaatggtgggctcaatctactgcggtggccgactgccaactccagcgtctctgggaaatctctgtacgtgattcttgaaaacagcttatgtaattaaaggtttaattttctaatatc

SEQ ID NO: 1038 - DNA, 2535 bp, Rattus norvegicus
  Genbank Accession No. NM_024392
gagcagtaccccggccactgccagtgtgtgcgtggtgcaggatagactcatggcttcgcctctgaggttcgacgggcgtgtggtcctggtcaccggcgccgggggagggttgggcagagcttatgccctggcttttgcagaaagaggagcattagttgttgtgaatgacttaggaggggacttcaaaggcgttgggaaaggctcttctgccgcagacaaggtcgtggaagaaataagaaggagaggcgggaaagcggtggccaattacgattcaggcgaagcaggcgagaagcttgtgaagacagcactggacacattcggcagaatagatgttgtggtgaacaatgctgggatcctgagggaccgttccttctctaggataagtgatgaagactgggatataattcaaagagttcatttgcggggctccttccaagtgacccgggcagcatgggatcatatgaagaagcagaattatggaagaatcattatgacggcctcagcttctggaatatacagcaactttggccaggcaaattatagtgctgcaaagctgggccttctgggtctcgccaatactctcgtgattgaaggcaggaagaacaacattcattgtaacaccattgccccaaacgctgggtcacggatgacagagacggtgatgccagaagacctcgttgaagccctgaagccagagtatgtggcaccgctggtcctttggctttgccatgagagctgtgaggaaaatggtggcttgtttgaggttggagcaggatggattggaaaattgcgctgggagaggaccctgggagccattgtcaggaagcggaatcagcccatgactcccgaggcagtgagggacaactgggtgaagatctgtgacttcagcaatgccagcaagccgaagagcattcaagagtccacaggtggtataatcgaagttttacataaaatagattcagaaggaatctcacaaaatcacaccggtcaagtggcatctgcagatgcatcaggatttgctggcgtcgttggccacaaacttccttcattttcttcttcatatacggaactgcagtgcattatgtatgccctcggagtaggagcttcagtcaaaaatccaaaggacttgaagtttgtttatgaagggagtgctgacttctcctgtttgcctacatttggagtcattgtcgctcagaagtccttgacgagtggaggcttagcagaggttcctgggctgtcaatcaactttgcaaaggttcttcatggggagcagtacttggagttgtataagccacttccccgatcaggggaattaaaatgtgaagcagttattgctgacatcctggataaaggctctggcatagtgattgttatggacgtctattcttattctggcaaggaacttatatgctataatcagttctctgtcttcgttgttggctctggaggctttggtggaaaacggacatcagaaaaactcaaagcagctgtagccgtaccggatcggcctccagatgctgtactgagagataccacttcactgaatcaggccgctctgtaccgcctcagtggagactcgaatcctttacacattgacccgagctttgcgagcattgccggttttgagaaacccatattacacggattatgtacttttgggttttctgcaaggcatgttttacagcagtttgcggataatgatgtgtcaagattcaaggccattaaggttcgttttgccaaaccagtgtatccaggacaaactctacaaactgagatgtggaaggaaggaaacagaattcattttcaaaccaaggtccaagagactggagacattgtcatttccaatgcatatgtggatcttgttcctacatctggagtttccgctcagacaccttctgagggtggagcactgcagagtgctcttgtatttggggaaataggtcgacgcctcaaggatgttggacgtgaggtggtaaagaaagtaaatgctgtatttgaatggcatatcacgaaaaatgggaatgttgcagccaagtggaccattgacctgaagaacggctctggagaggtttaccaaggccctgccaaaggctctgctgacacgaccatcacaatttctgatgaggatttcatggaagtggtcctgggcaagcttaacccacagaatgccttcttcagtggcagactgaaggcccgaggaaacatcatgctgagccagaagctacagatgattctgaaagactatgccaagctctgaaggacccactgcgtgctttaataaaaccagaatcattacgttctgtctacgcagtcatgctccagccttctttgaaacgatccacggtaatgtgcagcagaaatcgcttaacattttcagattcagataactttcagattttcattttctactaatttttcacatattatttttataaggaactgtaatctagctagcaaataattgttctgttcatagatctgtatcttaataaaaaaaaagtcaaccgaaaaaaaaaaaaaaaaaaaaaaaaaaaa

SEQ ID NO: 1039 - DNA, 1552 bp, Rattus norvegicus
  Genbank Accession No. NM_024399
cagttcccaagagagctctgtatttttcacttctcacttagatctaaacttggaaacttttctcagaagttaagtgtcctttgacctcctctcttctgaattgcagaaaccagaccagattttggtatttggtaaaatgacttcttgtgttgctgaagaacctattaaaaagattgccatcttcggagggactcatggaaatgaactgactggagtgtttctagttactcactggctaaagaatggcgctgaagttcacagagcagggctggaagtgaagccattcattaccaacccaagagcggtggagaagtgcaccagatacattgactgtgacctgaaccgtgtttttgaccttgaaaatcttagcaaagagatgtctgaagatttgccgtatgaagttagaagggctcaagaaataaatcacttatttggtccaaaagatagtgatgatgcctacgatgtcgtttttgtccttcataacactacttctaacatgggttgcactcttattcttgaggattccaggaatgactttttaatccagatgtttcactatattaagacctgcatggctccattaccctgctctgtttacctcatcgagcatccttccctcaaatatgcaaccactcgttccattgccaagtatcctgttggtatagaagttggtcctcagcatcacggtgttctgagagctgatattttagaccaaatgagaagaatgctcaagcacgctcttgattttatacagcgtttcaatgaaggtaaagaatttcccccctgtgctattgatgtctataaaataatggagaaagttgattatccaaggaacgaaagtggagacgtggctgctgttatccatcctaatctgcagctgcaggatcaagactggaaaccattgcaccctggagatcctgtgtttgtgtctcttgatggaaaagttattccactgggtggagactgtaccgtgtacccagtgtttgtgaatgaagctgcatattatgaaaaaaaagaagcatttgcaaagacaacaaaactaacactcaacgcaaaaagcatccgctccactttgcactaaacatctctgcaagctcacagttatgggatcttacagacctctagaagtctgtaaacgctccaagaccagagtgcctcattctagttcttttcctcagcaccttggccccatgcctcaagcagtaagcatccaggccaggttctgagaggaacgaataaattcatgaatgtctttcatatatgtttggatgagctatgtacagtagacaggcaagtgtgcttggttctgtattaattctttatacattacattctggtagtttaacattgttaactttcacatttagaacataacattgaaatacatgcctacatgcaatttagcatacagtgagacagactgaatatgtgttttcaaggaatgcataagtactattcaaaactaatagtacagacttgctgtttttaagtgctgatatgtgagttaataacagtgtattattaaatgtccattccttaaaaaaaaaaaaaa

SEQ ID NO: 1040 - DNA, 4878 bp, Rattus norvegicus
  Genbank Accession No. NM_024400
ctgtcactaggcctgagcgcacagcccggcggagagagcagatccttgctcagtatccagccctatcgcggccaaggcggaggacgaagagtccaggctcttattctggacttgttccccaattccagggcgcttctcgatcctgcagcagcctcttagcagctccagcagtgcggagccattaactcggtgctggaataaaaaaaattcccgcgcgccggcgcagcctttttctaagtgacccggagcttttggctgcgagctctgcaagaactttcaaatcaaagtgcttgtgaattttaagcatccggagcaggccaacgaagctctgcgcgtctaaccgtctaaccgtctaaccagaacaagagttctctgcgctgcagtgtgcggtgtcatgcagccagaagtccctttggggtcaggcaagctgaagccctgctcagacatgggggacatccagcgggcagcgaagtttcggagctctcagtctgcacacatgctgttgctactcctcgcttccataacaatgctgctgtgtgtgcggggcgcacacgggcgccccacggaggaagacgaggagctggtgctgccctcgctggagcgcgcccggggccacgattccaccacactcctccgtctggacgcctttggtcagcagctgcatctgaagttgcagccagacagcggtttcttagcgcctggcttcaccctccagacggtggggcgcagtcctgggtccgaggcacagcatctggaccccactggggacctggcccactgcttctactctggcacggtgaacggtgaccccagctccgccgccgccctcagcctctgtgaaggtgtgcgcggtgccttctacctacaaggcgaggagttcttcattcagccagcgcctgcggtggccaccgagcgcctggtccccgccgaaccgaaggaggagtcaatcgcacctccgcggttccacatcctgaggcgaaggcggcggggcagcggcggcgcaaagtgcggtgtcatggacgaagagaccctgccaaccagcaactcgggtcgcgaaagccagaacaccccggaccagtggcctctgcggaaccccactcctcagggcgcgggaaagccaacaggaccaggaagcataaggaagaagcgatttgtgtccagcccccgttatgtggaaaccatgctcgtggctgaccagtccatggctgacttccacggcagcggtctaaagcattaccttctaaccctgttctcggtggcagccagattttacaagcaccccagcattaggaattcaattagtctggtggtggtgaagatcttggtcatatatgaggagcagaagggaccggaagttacttccaatgccgctctcacccttaggaatttctgtagctggcagaaacagcacaacagccccagtgaccgggatccagagcactatgacacagcgattctgttcaccagacaggatttatgtggctcccacacctgtgacactctcgggatggctgatgttggaactgtatgtgaccccagcaggagctgttcggtcatcgaagatgatggtttacaggctgccttcaccacagcccatgaattgggccatgtgtttaacatgccacacgatgacgccaagcactgcgccagctttaatggcgtgagtggggattcccatctgatggcctcgatgctctccagcttggaccacagccagccctggtctccttgcagtgcctacatggtcacatcattcctggacaacggccatggggaatgtttgatggacaagccgcagaacccaatcaagctcccatctgatcttcccggtaccttgtacgatgccaaccgccagtgtcagtttaccttcggggaggaatccacgcactgccctgatgcagccagcacatgcagtaccctgtggtgcactggcacctccggtggcttactggtgtgccaaacaaaacacttcccttgggcagatggcaccagctgcggagaagggaaatggtgtgtcagcggcaagtgtgtgaacaagaccgacatgaagcactttgctactcctgttcatgggagctggggaccgtggggaccatggggagactgctcaagaacctgtggtggaggagttcaatatacaatgagagaatgtgacaacccggtcccaaagaacggggggaagtactgcgaaggcaaacgagtccgctacaggtcctgtaacattgaggactgtccagacaataacggaaaaacattcagagaggagcaatgcgaggcgcacaatgagttttccaaagcttcctttgggaatgaacccacggtggaatggacacccaagtatgctggcgtctcgccaaaggacaggtgcaagcttacctgcgaagccaaaggcattggctacttctttgttttacagcccaaggtggtagatggcactccctgtagtccagactctacttctgtctgtgtgcaaggacagtgtgtgaaagctggctgtgatcgcatcatagactccaaaaagaagttcgataagtgtggcgtttgtggaggaaatggctccacgtgcaagaaaatatcaggaacggtcactagtacaagacctgggtatcatgacattgtcacaattcctgctggagccaccaacattgaagtgaaacatcgtaatccaaggggatccagaaacaatggcagctttctggctattagagctgcagatggtacctatattctgaatggaaacttcactctgtccactctagagcaagacctcacctacaaaggtactgtcttaagatacagtggttcctcagcagcattggaaagaatccgcagctttagtccactcaaagaacccctgaccatccaggttcttatggtgggccatgctctccgacccaaaatcaagtacacctattttatgaagaagaagacggagcccttcaacgctattcccacattttcggagtgggtgattgaagagtggggggagtgctccaagacatgtggttccggttggcagaggagagtggtagagtgcagagacattaatggacaccctgcttctgaatgtgccaaagaagtgaagccagccagtaccagaccttgtgcagaccttccttgcccacgttggcaggtgggggattggtcaccatgttctaaaacttgtgggaagggttataagaagagaaccttgaaatgtctgtcccatgatggcggtgtgttatcaaatgagagctgtgatcctttgaagaaaccaaagcattacattgacttttgcatactgacacagtgcagttaagaggttttgaggacaaggtagcgtgggagggctgatacactgaaagcaagagtgctggagggatcctgtgaatcaaaccagtaaacagtgaggtgtggcaatgaggtgtgtataggggatacattagcaaaagaggtagatccgtacactatcctgccagttaacttctgatagggtagttaatgaggaatagtagcatctgaaagatcatacatagcactatgaagccccaaagtactattagtattccttttgttacatccactgcacaaataattttcagagtctggcagaagcatggctaccctgttgcatggtactaattaatactttgtatcacaggggttgggaaaggaaagcagaagaatggtaagattggatttcaaacatggcttacttttttatcactggaggcagggagaagggtacaaacaagatcattattcaaagtttctggctgccgtggtttcagggaaggttgattcctatcaagagtgaaaagttctgattgctcaacatgagagagagaaagcctcgtctctgtgaaataactcttgatttcttcttagaccatctccgttttttaaccataattcctgttgaggtagtaacaattcacctacttataaaatgtacattgggtgggaaaaagtgaagtataagagttacacataaaaactcaaggaataagcaacatggctcctgctttgctttctcctaaggttagcctgcctgggatctgtggacgttaaagataatccttgactcacaaaaggcagtaaaaccatacatgtcatgcaagagtaagaatgggctatagagatcagggtcccatgagatgggggacacggaggtcactcatctcacatgggagactgctgcaggatagcaggtccactcctggcagctggtccaacagtcgtatcctggtgaatgtctgttcagctcttttactgagagagaatatgactgtttccatatgtatatagtaaaatacattactatgatttatatgtactttataagtattggtttgtttgttccttctaagaaggactatagtttataataaatgcctataacatatttatttttatacatttatttctaatgataaaaccttttaagttatatcgcttttgttaaagtgcatataaagatagagtatttatacaatatatgttaactagaaataataaaagaacacttttgaatgtgtttgcctattttctgaagtgggcttaactcctgggcaagaaatctaatgagacacaagcattggatttcaggacagctttaaaatctgggtgaatgaactgtatttcctgtttatagacatactaataaaaaagaagttgatgatgtctttagtgataagattgttactaacgtggttggcaaattactgtaaagagtcagatagtaagcgtttatggcattgtaggctatatttcctgccacaaccctgtgacagtgaatgctttgtaggaatgagagcagccataaatgacatgtacaccatagctgtgctttaataaaaccttatttgcaaaaaaaaaaaaaaaaaaaaaaaaaaaaaa

SEQ ID NO: 1041 - DNA, 1173 bp, Rattus norvegicus
  Genbank Accession No. NM_024403
tcgagttaagcacattcctcgataccagcaaatccctacaacatgaccgagatgagcttcctgaacagcgaagtgttggcgggggacttaatgtcccccttcgaccagtcgggtttgggggctgaagaaagcctaggtctcttagatgactatctggaggtggccaagcacttcaaacctcatgggttctccagcgacaaggcgggctcctcagaatggctggctatggatgggttggtcagtgcctcagacaccggcaaggaggatgccttttccgggacagattggatgttggagaaaatggacctgaaagagtttgacttcgatgctctgtttcgaatggatgacctggaaaccatgccagatgagcttttggccacgttggatgacacatgtgatctttttgcccctctagtccaagagactaataaggagccccctcagacagtgaacccaattggccatctcccagaaagtgtaataaaagtcgaccaggctgccccctttacattcttgcagcctcttccctgttccccagggtttctgtcttccactccagatcattcctttagtttagagctgggaagtgaggttgatatctctgaaggagataggaagcctgactctgctgcttatattactctaacccctcagtgtgtaaaggaggaagacactccctctgatagtgacagtggcatctgtatgagccctgagtcctacctgggctctccccaacacagcccttccacctccagggccccaccagacagtctgccttctccaggtgttcctcgtggttctcgacccaaaccttatgacccacctggagttagtgtgacagctaaagtgaagactgaaaagttggataagaagctgaaaaagatggagcaaaacaagacagcagctactaggtaccgccagaagaagagggctgagcaggaagccctcactggcgagtgtaaagagctagaaaagaagaacgaggctctgaaagagaaggcagattctctcgccaaagagattcagtatctaaaagacctgatagaagaggtccgtaaggcaagggggaagaagagagttccttaatagggtagtcaggtgctttgtgcttgtacatagtcttgtgatgctgtgtttgctgtaataaattattttgtagtgaaagtaaaaaaa

SEQ ID NO: 1042 - DNA, 2052 bp, Rattus norvegicus
  Genbank Accession No. NM_024484
cgggacactttgcagacatggagactgtcgttcgcagatgcccattcttatcccgagtccctcaggcctttctgcagaaggcagggaaatctctgctgttctatgctcaaaactgccccaagatgatggaagtcggggccaagccggctcctcggaccgtgtccacttcagcagcacagtgccagcaggtcaaagaaacccctccagccaatgagaaagagaaaactgccaaagccgcagtccagcaggctcctgacgagtcccagatggcacagactccagacggcacacagctcccgcctggacacccgtcaccctctacaagccagagctctgggagcaagtgccctttcctggcagcacagctagccagacgggcagcagcgtcttccgcaaggccagtctggagcttcaggaggacgtggcaggaaatgcatgctgtgaggacagaggttgctcaaagcccagtgctccccagcttggtcaatgcaaaaagggatggagaaggtccaagcccactgctgaagaacttccaggacatcatgagaaagcaaaggccagaaagagtgtctcatcttcttcaggataacttgcccaaagtcgtttccacttttcaatatgatcatttctttgagaagaaaattgacgagaaaaaaaatgaccacacctaccgagtttttaaaactgtgaaccggagagcacagatctttcccatggcagatgactacacggactccctcatcaccaataatcaggtgtcggtctggtcgagtaacgactatctaggcatgagtcgacacccacgggtgtgtggggccgtcatagagactgtgaaacagcatggtgccggtgcaggtggaactagaaatatttctggaacgagcaagttccatgtggaactggagcaggagctggctgacctccacggcaaggacgcggcgctcttgttctcttcctgcttcgtggccaacgactccactctcttcaccctggctaagatgatgccaggctgtgaaatttactctgattccgggaaccatgcctccatgatccaagggattcgcaacagtcgagtgccaaagtatatcttccgccacaatgatgtcaaccatctcagagaactgttgcagagatccgacccctcggtccccaagatcgtagcattcgaaactgtccattcaatggatggagcagtgtgccccctggaagagctgtgtgatgtggcccatgagtttggagcgatcacgtttgtggacgaggtccatgcagtagggctctatggggcttcaggtggagggatcggtgatcgggatggagtcatgccaaaaatggacatcatttctggaacactcggtaaagcgttcggctgtgttggaggatacattgccagcacgagtttgctgatcgacaccgtccggtcctacgctgcgggcttcatcttcaccacctccctgccaccaatgctgctggctggagccctggagtctgtgcggatcctgaagagcaatgagggacgtgcccttcgccgccagcaccagcgcaatgtcaagcttatgaggcagatgctaatggacgctggcctcccagtcatccactgccccagccacatcatccctgtgcgggttgccgatgctgctaaaaacacagaaatctgtgatgagttgatgaccaggcataatatctacgtccaggccattaattacccaacagtgcctcgtggggaggagctcctccggatcgcccccaccccgcaccacacaccgcagatgatgaactacttcctagagaagctgctgctcacgtggaagcgagtcgggctggaactgaagccacattcgtcagctgaatgcaacttctgcaggaggcccttacacttcgaagtgatgagcgagagagagaaagcctatttctcaggcatgagcaagatggtgtctgcccaggcctgactgtgactcagttattcacaaaccccagaccattaccatacccaaatagtagccagaattgtctttagatgtgaagtaaattatatattaaatcttaatctatagt

SEQ ID NO: 1043 - DNA, 15438 bp, Rattus norvegicus
  Genbank Accession No. NM_030827
aggagccagcgggtagtgctgaacaagactcctgttccggagcggagtaacctgcctgtgcccgctgcgacgcgcgcccacctcccggggaaggaacggcgaggcccggggccgtctccgcgatggagcgcggggccgcagcggcggcgtggatgctgttgctggcgatcgctgcctgcctggagccagtcagtagccaagaatgcggcagtgggaattttcgctgtgacaatggatactgtatccctgcgtcctggaggtgtgatgggaccagagactgtttggatgacacagatgaaattggctgtcctcccaggtcctgcgaatcaggccttttcctgtgtcctgctgaggggacctgcatccctagctcctgggtgtgtgacgaggataaggattgttcggacggtgcagacgaacagcaaaattgtgctgggaccacgtgctcggctcagcagatgacgtgctccaacggtcagtgtattccgagcgaatacaggtgcgaccatgtcagcgactgccccgacggctctgacgagagaaactgccattatccaacatgtgatcaacttacttgtgccaatggagcctgctataacacgagtcagaggtgtgaccaaaaagttgactgcagggattcctcggacgaagctaactgcactaccctgtgttcgcaaaaagaatttgaatgtggcagtggagagtgtatccttcgcgcctacgtctgtgaccatgacaatgactgcgaagataacagcgatgagcgcaattgcaactatgacacctgcggaggtcaccagttcacttgctccaatggccagtgcatcaaccagaactgggtttgtgatggagatgacgactgccaagattctggtgatgaagatggatgtgaaagtaaccagagtcatcataggtgttacccaagagaatgggcgtgtcctgggtctggacgatgcatctcaattgataaagtttgcgatggagttcctgactgtccagaaggagacgatgagaacaacgtcacaagcggaagaacctgtggtatgggtgtctgctctgtcttaaactgtgagtaccagtgccatcagacgccatttggaggagaatgcttctgccccccaggtcatattatcaacagcaatgacagccgtacttgcattgatttcgacgactgccagatatggggaatttgtgaccagaagtgtgaaaaccgacagggccgtcatcagtgcctctgtgaagaagggtatatcctggagcgagggcagcattgcaaatccagtgactccttcagtgcagcctctgttatcttctccaatggtcgggatttgctagttggagatcttcatggaagaaacttccggattctagcagagtctaagaaccgaggaatggttatgggagtggattttcactatcagaaacacagagttttttggacagaccccatgcaggaaaaggtgttttccactgacatcaatggcttaaatacccaagaaattcttaatgtttctgttgacactccagagaatctggctgtggattggattaataataaactttatctggtagagacaaaggtcaaccgcattgacgtggtcaacttggagggaaatcagcgtgttactctcataactgaaaacttagggcatcctagaggaattgcccttgatccaactgtgggctatttgtttttctcagattggggaagcctctctgggcaacccaaggtggagagagccttcatggatggtagcaatcggaaagacctggtaacaaccaaagtggggtggcctgctgggatcactctggatctggtgtccaagcgagtttactgggtggattctcgttatgactacattgaaactgtaacatatgacggaattcaaaggaagacggtagctcgtggaggctcccttgttccgcatccctttggaataagcttatttgaggaacacgtgttctttactgattggacaaagatggctgtgatgaaagccagcaagttcacagaaaccaaccctcaagtgtaccaccagtcttccctgaggcctcacggagtgacggtttaccatgccctcaggcaacccaatgccaccaatccgtgcgggagcaacaatgggggctgtgcgcaggtctgtgtcctcagtcacaggacggataatggtggcctgggctaccggtgcaagtgtgaattcggctttgaactggatgatgatgagcaccgctgtgttgccgttaagaacttcctgctcttctcatcgaaaacggctgtgcgtggaatcccattcaccctctccacccaggaagatgtcatggttcctgtcacagggagtccatccttcttcgttggaattgattttgatgcccaacacagtactgtcttctattcagatttgtcaaaagacataatttataaacaaaaaattgatggcacaggaaaagaggttatcacagcaaaccggttggaaagtgttgagtgtttgacttttgactggatctcaaggaatctttactggacagatggaggactaaagagtgtcactgtcctgaggctggctgataagtcccgacgacagataatcagcaacttaaacaaccctcgttccattgtggtgcatccgaccgctgggtatatgttcctgagtgattggttccgtcctgcaaaaattatgagagcatggagcgatggttctcacctaatgcccatagtcaatactagtctggggtggcccaatggcttggccatcgattggagtgcttcacgattgtactgggtagatgccttttttgataagattgaacacagcacccttgatggtttagatagaaaaaggctgggccatgtagaccagatgactcatccatttggactcaccgtttttaaagataatgtgttcataacagactggagactgggtgctattattcgagtgaggaaatcagatggtggtgatatgacagttattcgaagaggcatcagcagcgtaatgcacgtgaaagcctacgatgctgacctccagactgggtctaactactgcagtcagaccacccacgccaacggtgactgcagccacttctgcttcccggtcccgaacttccagcgggtgtgcggctgtccctatggaatgaagcttcagagggatcaaatgacttgtgagggagacccagcccgagagccacccacacagcagtgtggctccctctcctttccctgcaacaatggcaagtgtgtgcccagtttcttccgctgtgatggagtggacgattgccatgacaacagtgatgagcatcagtgcggggtgtttaataatacttgctcaccttcggctttcgcctgcgtccgcggtggacagtgcatccctggccagtggcactgtgacagacagaatgactgtttagacggcagtgatgagcaaaactgccccacacatgccacgtcgtccacttgcccgtccacctccttcacctgcgacaatcacgtgtgcatcccaaaagactgggtctgtgacacagacaatgattgctcggatggctcggatgaaaagaactgccaagcttcagggacctgccagcctacacagtttcggtgccctgaccaccgatgcatcagcccgctgtatgtctgtgatggggacaaggactgcgcggatgggtctgatgaggcgggctgtgtgttaaactgtacgagtgcccagttcaaatgtgccgatgggagttcttgcattaacagcaggtaccgctgcgatggggtttacgactgcagggacaactctgacgaggcaggctgccccaccaggcctcccggcatgtgccacccggatgagttccagtgccaaggagacggtacatgcatccctaacacctgggagtgtgacgggcatccagactgtatccacgggtccgacgagcacactggctgtgttcctaagacctgctcgccgactcatttcctctgtgacaatggaaactgcatctacaaagcgtggatctgtgatggggacaatgattgtagggatatgagtgatgagaaggactgtcctacccagccttttcactgtcctagcacgcagtggcagtgcccgggctacagcacctgtatcaatctgagtgccctgtgtgacggcgtctttgactgtccgaatgggactgacgagtccccactttgcaatcaagacagctgctcccattttaatggtggctgtactcatcagtgcatgcaagggcccttcggagccacatgcctatgcccattaggataccaacttgccaatgataccaagacctgtgaagatatcaatgagtgcgatattccaggcttctgcagccagcactgcgtcaacatgagaggttccttccggtgcgcttgtgatccagaatatacgctggaaagtgatgggcggacttgcaaagtcacaggatctgaaaatccgttgttagttgtagcaagtcgtgacaaaatcattgtggacaacatcactgcccacacgcacaatctctactcgttggtccaggatgtttcttttgtggttgctcttgattttgattcagtcactggtcgtgtcttctggagtgacttactgcagggtaaaacctggagtgtctttcaaaacggaacagacaagagagtggtccatgacagtggcctctctgtgacagaaatgattgcagtagattggattggtcgcaacctttactggacggactatgctcttgaaacaatcgaagtttctaaaattgatggaagtcacagaacagtactgatcagcaaaaatgtcacaaaaccgaggggactcgcgttagatcccagaatgggtgacaatgtaatgttttggtctgactggggccatcaccctcgcattgagcgagccagcatggatggcaccatgcgcacagtcattgtccaggaaaagatctactggccctgtggcttaagcatcgactaccccaaccgcctcatctacttcatggatgcctatcttgactacattgaattctgtgattacgacggacataaccgaaggcaggtcattgctagcgatttggttctccaccatccgcacgccctcactctgttcgaagactttgtgtactggactgaccgtggtactcggcaggttatgcaggccaacaagtggcatggggggaaccagtcagttgtaatgtacagcgttcaccaaccgcttggaataactgccattcatccttcaaggcaaccaccttcccggaatccatgtgcctctgcctcttgcagccatctttgcctgctttctgcacaggcgcctagacattattcttgtgcttgcccttcaggatggaacctctccgatgattctgtcaactgtgtgagaggtgaccaacctttcttgatgtccgtaagagacaatataatttttggaatctcccttgatcctgaggtgaagagcaatgatgccatggtccccatatcagggatacagcatggttatgatgttgaatttgatgactctgagcaattcatctactgggttgagaatccgggtgaaattcacagagtgaagactgatggcagcaacaggacagtgtttgctcctctgtccctgctggggtcttctttaggcctggccttggactgggtatcaaggaacatttattataccactcctgcaagtcggtccattgaggtgttgacgctcaagggagatacgaggtatggaaaaaccctgattgccaatgacggcacccccctcggagttggtttccccgttggcatagctgttgatcctgcacgtgggaaactatattggtcagaccacgggacggacagtggggttcctgccaagatcgcaagtgctaatatggatggaacatctttaaaaattctcttcactgggaacctgcagcatctggaggttgtcaccctggacattcaggagcagaagctgtactgggcagtcaccagcagaggcgtgattgagagaggaaatgtggacggtacagagaggatgatcctggtgcaccatctggcccacccatggggccttgtggtctatggctccttcctttactactctgatgaacagtatgaggtcattgagagagttgacaagtcctctgggaataacaaagtcgtcctcagagataacgttccgtacctgaggggtcttcgggtttaccaccgccgcaatgccgctgactcttccaatggctgtagcaacaaccccaacgcttgccagcagatctgcctgcccgtgccaggtggaatgttctcctgcgcctgtgccagtggctttaagctcagccctgacggtcgctcctgttctccatataactcgttcatggtcgtttccatgctgcccgcagttagaggctttagcttggagttgtctgatcactcggaggccatggtgcccgtagctggccaaggacgaaatgttctgcatgcggacgtggatgttgccaacggctttatttactggtgtgattttagcagctctgtaagatcctctaatggaattcgtagaatcaaacccgacgggtctaattttaccaacgtcgttacctatggcattggggcaaatggaatccggggtgttgcactggactgggcagcaggaaatctttattttaccaatgcctttgtgtacgaaaccctgatagaagtgttacggatcaataccacgtaccgccgtgtactcctcaaagtctcagtggatatgccccggcatattattgttgaccccaagcatagatatctcttctgggccgactatgggcagaagccaaagatcgaacgctcttttcttgactgtaccaatcgaactgtccttgtttccgaaggcattgtcacccctcggggcttggccatggaccatgacactggctatatttattgggttgatgactccttagatttaattgccaggatccatcttgatggaggagaatctcaggtggttcgctatggcagccgttacccaactccctatggcatcactgtgtttggagagtctatcatttgggtggatagaaacttgaaaaaagtcttccaagccagcaagcaaccagggaatacagatccacccgtagtgataagagataagatcaacctgctccgtgacgtgaccatctttgacgagcacgcccagcccctctcaccagcagagcttaacaataacccttgtctgcaaagcaatggtgggtgttcccacttttgctttgccttacctgagttgcctactcccagatgtggatgtgcttttgggactctgggaaatgatggcaagagctgtgctacctcccaagaagatttcctcatctattccttaaataattccctgagaagtttacactttgaccctagagaccatagcctacctttccaagtgataagtgtggcgggaactgccattgcactggattatgaccgtagaaacaatagaatcttcttcacacaaaagctaaactctctccgtggccagatttcctatgtcagcctgtattcagggagcagctctccaactgtcctgctgtcaaatataggggtgactgatggcattgcctttgattggataaatagaagaatttattacagtgacttttcaaatcagacaataaattccatggctgaagatggatccaatcgtgctgtgattgcccgtgtttccaaacccagagctattgtattagatccttgccgagggtacatgtattggactgactggggtaccaacgccaaaatcgagagagccacactgggaggaaacttccgggtccccattgtgaacaccagcttggtttggcccaatggactcgctttggaccttgagactgaccttctgtactgggcagatgctagcttgcagaaaatagaacgcagtactctcacgggcacgaaccgagaagtcgttgtcagcactgcctttcattcctttggcttgactgtctatggccagtacatttactggacagacttgtacaccagaaaaatctaccgggctaacaagtacgacgggtcagacctggtagcaatgaccacacgtttgcccacccagcctagtggtatttccacagtggtcaaaacccagcggcagcagtgtagcaatccttgtgaccagttcaacggaggatgcagccatatctgtgctccaggtccaaatggagctgagtgtcagtgtcctcacgaaggcaactggtatctggccaacgataacaagtactgcgttgtggacacggggacccgctgtaatcaactccagttcacctgcctcaatgggcattgtattaatcaggattggaaatgtgacaatgacaacgactgtggtgatggcagtgatgagcttcctacagtctgtgcctttcacacctgccgatcaacagccttcacttgtggcaacgggcgatgtgtgccataccactatcgctgtgattactacaatgactgcggggacaacagcgacgaggcaggttgcctgttcagaaactgcaacagcaccacagagttcacgtgcagcaatgggcggtgcataccgctcagttatgtctgcaatggcataaacaattgccatgacaatgacacctcggatgagaaaaactgccctccccacacttgcccgccggatttcacaaaatgccagaccacgaatatttgtgttccccgagctttcttgtgtgatggagacaatgactgtggagacgggagtgacgagaaccccatttactgcgcctcacacacatgccgcagcaacgagttccagtgcctctcccctcagcggtgtattccaagctattggttctgtgacggtgaagccgactgtgcagatggctcggatgaacctgacacttgtgggcattctgtgaacacctgcagggccagtcagttccagtgtgataatggcaggtgcatctcaggcaattgggtctgtgatggtgataacgactgtggggacatgagtgacgaggaccagcggcatcactgtgagcttcagaactgttccagcactcagtttacctgtgtcaacagcagacctcccaacaggaggtgcatcccacagtactgggtctgtgacggtgatgcggactgctcggacgccctggacgagctgcagaattgcaccatgagaacctgctctgcaggggagttcagctgtgcaaatggacgatgtgtcaggcagtcattcaggtgtgatcggcgcaatgactgtggagactacagtgatgagaggggctgctcgtacccaccctgccatgcaaatcaatttacgtgtcagaacgggcggtgtatccctaggttctttgtttgtgatgaggacaatgactgtggagatggttctgatgagcaggagcacctgtgtcacaccccagaacccacatgcccccttcatcaattccggtgtgacaacgggcactgcatcgagatggggcgagtctgtaaccatgtggacgactgctcagacaacagcgatgagaaaggctgtggcattaacgagtgcctagattcttcaatcagtcgctgtgaccacaactgtacagataccataactagtttctactgttcctgtctccctggctacaagctcatgtctgacaaacgctcttgcgtggatattgacgaatgcaaggagtcaccccagctctgtagccagaagtgtgagaatgtggtaggctcctatatttgcaagtgtgcccctggctacatccgtgagccagatgggaagagctgccggcagaatagtaacatcgagccctatctcatctttagcaaccgttactatataagaaacttaactacagatggctcatcttactccctgattttgcaaggattgggcaatgttgtggccctggactttgatagagtagaaaagaggctgtattggattgatgcagagaagcaaatcattgagaggatgtttttgaataagacaaaccgggagaccatcataaaccacaggttaagacgtgctgaaagtctggctgtagactgggtcagcagaaaactctattggttggatgccatcttggactgcctgtttgtctctgaccttgaaggtcgacaccgcaaaatgatagcccagcactgtgtggatgctaacaataccttctgctttgaacatcccaggggaattgtccttcatcctcaaagagggcatgtctactgggcagattggggtgttcacgcatacattggaaggattggcatggatggaaccaataagtctgtgatcatctctaccaagatagaatggcccaatgccatcaccattgactacaccaacgatctcttgtactgggcagatgctcacctgggttatatcgagttctctgatttggaaggtcaccaccgacacacggtgtacgatggatcactgcctcacccctttgctcttacgatttttgaagacactgttttttggacagattggaatacacggacggttgaaaagggaaacaaatatgatgggtcaggtcgagtggtgctggtgaacacaacgcacaaacccttcgacatccacgtgtaccatccataccggcagccgattatgagcaatccctgtggtaccaacaacggtggctgttctcatctgtgcctcatcaaagcgggggggagaggattcacctgcgcgtgtcccgatgacttccagaccgttcagcttcgagacagaacactctgcatgcccatgtgctccagcacgcagttcctgtgtggcaacaatgaaaagtgtatccccatatggtggaaatgtgatggccagaaagactgctctgatggttctgatgaaccagacctgtgcccacaccgcttctgccgtctggggcagttccagtgccgggatggcaactgcacgagcccccaggctctgtgcaatgctcgccaggattgtgctgatggctctgatgaagaccgtgttctctgtgagcatcaccggtgtgagtccaacgagtggcagtgcgccaacaagcgttgcatcccacagtcctggcagtgtgactcagtgaacgactgcctggataactcagatgaggacacttcgcactgcgccagcaggacctgcaggcccggccagttcaagtgtaacaatggtcgctgtatcccgcagagctggaagtgtgacgtagacaatgattgtggagactactccgatgagcccatcgacgagtgcacgaccgctgcttacaactgtgacaaccacacagaattcagctgcaagactaactaccgttgcatcccgcagtgggcggtgtgcaatggttttgatgactgcagggacaacagtgatgaacaaggctgtgaatcggtgccatgccatccttctggggatttccggtgtgcgaatcaccactgcatccctctccgctggaagtgtgacggcactgacgactgtggagataactcggatgaggaaaactgcgttcctcgggagtgctcagagagcgagtttcgatgtgctgatcagcaatgcatcccctctcgatgggtctgtgaccaagaaaatgactgtggagacaactcggatgaacgggactgtgagatgaagacctgccatcctgaacattttcagtgtacgagtggacactgtgtgcccaaggcgttggcatgcgatgggagggcagactgtctggatgcgtctgatgaatctgcttgtcctactcgctttcccaacggcacctactgcccagccgccatgttcgaatgtaaaaaccacgtgtgcatccagtcgttttggatatgtgatggggaaaatgactgtgtcgacggttccgatgaggagatccacctgtgcttcaacattccgtgtgaatcaccacagcgattccggtgtgacaacagccgctgtgtttatggccatcagctgtgcaatggtgtggatgactgcggagatggaagtgacgagaaagaagagcactgtagaaaaccaacccacaaaccgtgcacagacactgaatataagtgtagcaatgggaactgcatttcgcagcactacgtgtgtgataatgtgaatgactgcggagacctttctgatgaaactggttgcaatctaggagataacagaacgtgtgctgaaaacatatgtgaacagaactgtacccagctgagcagcggaggctttatctgctcctgcagacccgggttcaaacctagtacttcggacaaaaattcctgtcaagacatcaatgaatgtgaggagtttggcatctgcccccagagctgtcgaaacagcaaaggaagttatgaatgtttctgtgtcgatggcttcaagtctatgagtacccattatggagaacggtgtgcagctgatggaagccctcctctcttgctcctgcctgagaatgtccgaatccggaagtacaatacctcctctgagaagttctcagagtatctggaagaggaggagcatatccaaactattgactatgactgggatcccgagcacataggcctcagtgttgtctattacactgtgctggcacagggctctcaattcggtgctatcaaacgtgcctacattcccaactttgaatctggtagtaacaatcccatacgtgaagttgacctgggcttgaaatatttaatgcagccagatggattagccgtggactgggtcggaaggcatatttactggtcagatgctaagagccaacggattgaggtggctaccctcgatggaaggtaccggaagtggctgatcaccacccaactggatcagccagctgccattgctgtgaatcctaagctagggcttatgttctggactgaccagggaaaacagcccaaaatcgagtctgcctggatgaacggggaacatcgcagcgttctggtttctgagaaccttggctggccaaacggtctttccatagattacctgaatgatgaccgggtctactggagcgactccaaagaagatgtcattgaagccataaaatatgatgggactgacaggagacttatcataaatgaagcgatgaagcccttcagtctggacatcttcgaagacaagctatactgggtagctaaggaaaagggagaagtgtggagacaaaataaattcgggaaagagaacaaagagaaagtgctggtggtgaacccgtggctcactcaagttcgaatcttccatcaactgagatacaatcagtcagtgtccaacccttgcaagcaggtctgtagtcacctctgcctgctgagaccaggaggctacagctgtgcctgtccccaaggctccgacttcgtaactggcagcactgtccagtgtgatgcagccagtgaacttcccgtcaccatgcctcccccatgcaggtgcatgcacggaggaaattgctattttgatgagaatgaactccccaaatgcaagtgttccagtggctatagcggagaatactgtgaggttgggctctcgagaggcatccctccagggacgacaatggctgttctgttgaccttcgtgatagtcatcattgttggagctctggtgcttgttggactctttcactacaggaaaactggctccctcttacccactctgcccaagctgccaagcctaagcagccttgccaaaccctctgaaaatggaaatggggtgacgttcaggtcgggggctgatgtgaacatggacatcggtgtgtctcctttcggccctgagacaattattgacagatccatggcgatgaatgaacactttgtcatggaggtgggcaagcagcctgtgatatttgaaaacccaatgtatgcagccaaggacaacacttccaaagtggccctggcagttcaggggccatcaacaggcgcacaggtgactgtaccagaaaatgtggaaaaccagaattatggaaggcccatagatccttctgagatagttccagagccaaagccagcctcccctggagctgatgaaattcagggcaaaaaatggaacatcttcaaacgaaaacccaaacagacaacgaactttgagaacccaatctacgcagagatggacagtgaggtaaaggatgctgtggctgtggccccccctccgtctccttctctccctgccaaagcttcaaaaagaaatttgactccaggctacactgccacagaagacacctttaaagacactgcaaatctcgttaaagaagattccgacgtatagcctcgccagctctctagggaacatttagacactcacttttgcacatatattttttacagacaaatgaaaaagaagttaacattcaatactttataaaaaaaatatatttttctctgtttgcctataattgaaggtgtgtcgtgtgtcttttttactgatgccacttcatatttttacaattatcacgggcactgtgtatatcttggactgatgttgtctggaggtgatgctgtgaacattactggacttgtgtaaactttggaaggattatcacacctctgcccctgctaacacgaaggtgcccgttgagtgggtcgctgagctgaagaatacacgatctggtgaggaaaggaattggcctagggctttggatctgtctagagaggagataacactcatatttcctttgaaacaatacaggaattctttatgctcatttgagggcccatttttacacattggcacttaattaatagtcaacgttcaacatcacgtgtcaacctgattagtgagtgtgcagataggggccagtgttggcttcatgcgctgtagatggctcagacaacacagacggtacacagggtgactcagctggacccttctgcgctcctccgccttctgaggccagctatgttttgattgtgcttcgtccctagttgccaagtcaacatttgcacctgccgtgtcacgtcccatactgagtttctgtctcatggaacgagctcttgcttgacagaccttaaatcaacttaagcccttgcctgtcatctcaggtgtcccctaccttcgtgactggaattccgtagttgactgtatgtactaaagccagacccgtgtctccacagagcagggcgccgaacagacaccagtcgatcgaagcctcagctgggtgtctgactctgggtgcacaatgttattgtactgactatttatttcctcagttgacgacgaatagaaagggaaaacattcttcctgagcctttctcaggcctttgcctaaatccgtgcatttgtgtccgaacgtactgtacgtcccagctcttcttttgagtggttggtgtatcctctgtcacaggaagtatggcacgagcatgcgttttccacagcgagtagcattcctggttctctgtgttcaccttgcacatgtgttaatgaatgaatgggagggtgggagaatggatgaatgaaatatactactgattattttattctcgagtcctcgaaatattttgttgctcgtattttgagtacccattgtaattactttgattagaaattaaaaagctactggaaacgctgctgctggaaatttctaataaatgtgtattttatc

SEQ ID NO: 1044 - DNA, 737 bp, Rattus norvegicus
  Genbank Accession No. NM_030847
cgaggacagactccaactctgacttcttcagcgactctcgagacttcccgaaccaagccgtctttcctcagaccttacagtcctcccagccttcctctctgacttagagagccagaccccagccctcttcccccaggattgagtgctccgacccttcgaaggcttgcctctcctgctctgagccagcatctggcagccatgtcactcctcctgttggtggtctctgcccttcacatcctcattcttgtcttgcttttcgtggccactctggacaagtcctggtggactctcccagagaaggagtccctgaacctgtggtatgactgcacgtggaacaccaccgctaaaacgtgggcctgcagtaacgtcagtgagaacggctggctgaaggcagtgcaggcgctcatggtgctgtctctcatcctctgctgtctgtccttcatcctcttcatgatccaactctacaccatgcggagaggagggctcttctacgccaccggcctctgccagctctgcaccagtgcggctgtgttctccggggcactgatctatgccatccatgctaaggagatcctggcaaagcacccgagtggaggcagcttcggctactgcttcgccctggcctgggtggcctttccactcgccctggtcagtggcatcatctacatccacctgcggaaacgagaatgagcgctgtgtccccctagaaaataaagccctgtaaccacaaaaaaaaa

SEQ ID NO: 1045 - DNA, 2207 bp, Rattus norvegicus
  Genbank Accession No. NM_030872
gtctcccggctgtgcttggccgtgcggagggccggtgccagcacctccagctccgggacagcagcgggagccaagcccgagccgcaggcgtcgtcgccatgcgctggttccgggcgctgttgaagaatgcgtccctggcaggggcgcccaagtacatcgagcacttcagcaagttctccccgtccccgctgtccatgaagcagtttctagacttcggatccagcaatgcctgcgagaaaacttcattcaccttcctccggcaggagctgcccgtgcgcctggccaacatcatgaaagagatcaacctgcttcctgaccgggtgctgagcaccccctcagtgcaactggtgcagagctggtatgtccagagtctgctggacatcatggaattcctggacaaggaccccgaggaccaccggaccctaagccagttcactgatgccctggtcaccatccggaaccggcacaatgacgtagtgcccaccatggcacagggagtgttggagtacaaggacacctatggtgatgacccagtctccaaccagaacatccagtactttttggaccgcttctacctcagccgcatctctatccgcatgctcattaaccagcacaccctcatctttgatggcagcaccaacccagcccaccccaaacacattggcagcattgatcccaactgcagcgtgtctgatgtggtgaaagatgcctatgacatggctaagctcctgtgtgacaagtattacatggcttcccctgacctggagatccaggaagtcaatgccaccaacgccacccagcccattcacatggtctacgtcccctcccacctctaccacatgctctttgaactcttcaagaatgccatgcgggccacagtggaaagccacgagtccagcctcactctccctcccatcaaaatcatggtggccctcggtgaagaagatctgtccatcaaaatgagtgaccgaggcgggggtgtccccttgaggaagatcgagaggctcttcagctacatgtactctacagctcctacaccccagcctggcactgggggtaccccgctggctggctttgggtatggactccccatttcccgcctctacgccaagtacttccagggggacttgcagctcttctctatggagggctttgggacagatgctgtcatctatctgaaggccctgtccacggactcagtggagcgcctgcctgtctacaacaagtctgcctggcgccactaccagaccatccaggaggccggtgactggtgcgtgcccagcacagagcccaagaacacatcgacgtatcgggtcagctaggggccttctcttcctggcacctgggaggatgctgccacctctgaatccagccaccacagggacttccctatctatcccctggggtacgggggtgaaactgggtctccccgatggccagatctgtctttgtagaaatcgcagtggcccatctgtggcgatccctaagtgccaatctgtctctatggagaaacctagggggtttccctggagcctggtctccatggtgatgatgcttgagggttggggacggctctacctggtggggtggccccagagacacttctcccaagaccagagctgtctgttttctaccagaaaccctgggtccccctcactgcctgcatagtcctggtctcccacgtggctgcctcgcttgccttatgcccacaccctgtacaggcacattgggctggtttcttcgtcagtagtaagaaagatggagagagactggggaaacgggggccaaccttgtctctggtcctgcagcctctctccatctccactctggacactaaagttgccactgggaacttgagaatgggtggccgttctcacccaaggcccaccgagaaggcctaagagtaacctgtccccaaggcgatcttagcaatgtttctgccgcttcctggcctggcatgtcctcacgtgtatacctcccctgcccagtgtacgctcaccctatccctgcttgagctttagaccccagacttcctatgcccactatgtgtgcacagacgactcaaacccaggatgccccatgtacatagccagttttgtaatctcagatgcctcacccttgccctccgcacacaggggttaaagccgtgtgcccctcccagtggctgggatggtgacagtgacatccacagtaaatagatgaaatga

SEQ ID NO: 1046 - DNA, 1450 bp, Rattus norvegicus
  Genbank Accession No. NM_030985
cggggactggatgatgctgtcccgctggagaggattcgtggcttgagtcctgttccacccgatcaccggggtggccgaggcggtaccagcgctgcgctctctcagctcctgccacattccctgagttaacatatgagagattggtatagaaatggctggcattttgtctggataaatcacacaaccctcccagaaagtgatcaccaggtcaagtggatttcgaatagtgtctgagaccaactcaacccagaaaaacaaaatggcccttaactcttctgctgaagatggtatcaaaagaatccaagatgactgccccaaggctggcaggcacagttacatatttgtcatgatccctaccctctacagcatcatctttgtggtgggaatatttggaaacagcttggtggtgattgtcatttacttttacatgaagctgaagactgtggccagcgtctttcttctcaatctcgccttggctgacttatgctttttgctgacttgtcccctgtgggcagtctataccgctatggagtaccgctggcccttcggcaatcacctatgtaagatcgcttcggccagcgtgacgttcaacctctacgccagtgtgttccttctcacgtgtctcagcatcgaccgctacctggccatcgtccacccaatgaagtctcgccttcgccgcacgatgctggtggccaaagtcacctgcatcatcatctggctgatggctggcttggccagtttgccagctgtcatccaccgaaatgtatacttcatcgagaacaccaatatcacagtgtgcgcgtttcattatgagtctcggaattcgacgctccccatagggctgggccttaccaagaatattctgggcttcttgttccctttccttatcattctcaccagctatacccttatttggaaagctctaaagaaggcttatgaaattcaaaagaacaaaccaagaaacgatgacatctttaggataattatggcgattgtgcttttcttcttcttttcctgggtcccccaccaaatattcactttcctggatgtgctgattcagctgggcgtcatccatgactgtaaaatttctgacatcgtggacactgccatgcccatcaccatctgcatagcgtattttaacaactgcctgaaccctctgttctacggctttctggggaagaaatttaaaaagtatttcctccagctcctgaaatatattcccccaaaggccaagtcccactcaagcctgtctacgaaaatgagcacgctttcttaccggccttcggataacatgagctcatcggccaaaaagcctgcgtcttgttttgaggtggagtgacaggttcaaagcacactggcaatgtaatgccctgacagaagccagggagcctctgactaaatggcttacgaccaaaggaccattcaccctgcctcaggatctaagcagaaa

SEQ ID NO: 1047 - DNA, 2956 bp, Rattus norvegicus
  Genbank Accession No. NM_031005
gaattcggcacgaggtcagcagcaacctcctcgagcagagccgcggcggaagcgggctcaggggagcgagcccggccccgccagcccagcccagcccagcccagcccagcccaaccctgccgactccctccccacgcccgggtagcagccgccgtcgcctggagagaaggtggagaaagaaatctagcccctagcacgcacgcaccatcatggaccattatgattcccagcagaccaatgactatatgcagcctgaagaggactgggaccgggacctgctcctggatccggcctgggagaagcagcagagaaagaccttcacggcctggtgcaactcccacctgcgcaaagcagggacccagattgagaacattgaagaggacttccgagatggcctgaagctcatgctgctcctggaggtcatctcaggtgagcgtttggccaagccagagagaggcaagatgcgagtgcacaagatctccaacgtcaacaaggccctggatttcatagccagcaaaggggtcaagctggtgtccattggagctgaagaaattgtggacgggaatgtgaagatgaccctgggcatgatctggaccatcatccttcgttttgccatccaagacatctctgtggaagagacatcagctaaagaagggttgctcctgtggtgtcagaggaagacagccccatataaaaatgtcaacatccaaaacttccacatcagttggaaggatggtcttggtttctgtgccttgatccaccggcaccggcccgagttgattgactatggaaagcttcgaaaggatgatccactcacaaacctgaacacagcctttgatgtggcagagagatacctggacattccaaagatgctggatgcagaagacatcgtcggaactgcccggccagatgagaaagccattatgacctatgtgtctagcttctaccatgccttctctggagcccagaaggcggaaacagcagccaatcgcatctgtaaagtgttggccgtcaatcaagagaatgaacagcttatggaagactatgagaagctggccagtgatctgttagagtggatccgccgcaccatcccatggctggagaatcgggtgcccgagaacaccatgcaggccatgcagcagaagctggaggacttccgagactaccgacgcctgcacaagccgcccaaggtgcaggagaagtgccagctggagatcaacttcaacacactgcagaccaagctgcggctaagcaaccggcctgccttcatgccctccgagggcaggatggtctcggatatcaacaatgcctggggctgcctggaacaggcagagaagggctacgaggagtggttgctgaatgagatccggaggctagagaggttggaccacctggcagagaagttccggcagaaggcctccatccatgaagcctggacagacggcaaagaagccatgctgcggcagaaggattatgagacggccaccttgtccgagatcaaggccctactcaagaagcacgaggcctttgagagtgacctggctgcccaccaggaccgcgtggagcagatcgcggccattgcccaggagcttaatgagctggactattatgactcaccaagtgtcaacgctcgatgccaaaagatctgtgaccagtgggacaatctaggggccctgactcagaagcggagggaagctttagagcgaacagagaagctgctggagaccatcgaccagctatacttggagtacgccaagagggctgcacccttcaacaactggatggagggagccatggaggaccttcaagacaccttcatcgtacataccattgaggagatccagggactgaccacagcccatgagcagttcaaggctaccctcccggatgcagacaaggagcgcctggccatcctgggcatccacaatgaagtgtccaagattgtccagacctatcatgtcaacatggcaggcaccaacccctatacaaccatcacacctcaggagatcaatggcaaatgggaccatgtacggcagctggtgccccggagggaccaggctctaacagaggagcactcgaggcagcagcacaacgagaggttacgcaagcagtttggggcacaagccaatgtcatcggaccctggatccagaccaagatggaggagattgggaggatctccattgagatgcacggtaccctggaggaccaactcagccacctgcggcagtatgaaaagagcatcgtcaattataagccaaagattgaccagctggagggcgaccaccagctcatccaggaagcacttatcttcgacaataagcacaccaactacacaatggagcacatccgtgtgggctgggagcagctgctcaccaccattgccaggaccatcaatgaagtggagaaccagatcttgacccgggatgccaaaggcatcagccaggaacagatgaacgaattccgggcctccttcaaccactttgaccgggatcactccggcacgttgggtcccgaagagttcaaagcctgcctcatcagcttgggttatgatattggcaacgacccccagggagaggcagaatttgcccggatcatgagcattgtagaccccaaccgcttgggggtagtgacattccaggccttcatcgacttcatgtcccgagagacggctgacacagatacagcggatcaggtcatggcttccttcaagatcctggctggagataagaattacatcaccggggatgagctgcgccgcgagctgccacctgaccaagccgagtactgcatcgcgagaatggccccctacgcgggccctgactccgtgccgggtgctctagactacatgtccttctccacggcgctgtacggcgagagtgacctctaacccacccctgcctccccccaccctggccttctgcgcgtgcgccccaccctgctcctgctccgcccagt

SEQ ID NO: 1048 - DNA, 2260 bp, Rattus norvegicus
  Genbank Accession No. NM_031031
gggcgactaggaccttgtgcacacagagcagcagcagaaaccggggcgatgctacgggtgcggtgtctgcgcggcggcagccgaggcgccgaggcggtgcactacatcggctctcggcttggaggatccttaacaggatgggtgcagcgaactttccagagcacccaggcagctacagcttcctcccaaaattcctgtgcagctgaagacaaggccacccaccccctgcccaaggactgccctgtctcctcttacaacgaatgggaccctttagaggaagtgatagtgggcagagctgaaaatgcctgtgtcccaccattcacagtggaggtgaaggccaatacatatgaaaagtactggccgttttaccagaaaaatggaggtctttattttcccaaagatcatctgaagaaggctgttgccgaggtcgaagagatgtgcaatattttatcaatggaaggcgtgaccgtgaagcggcctgaccccattgactggtcactgaagtataagactcctgattttgagtctacaggtttatacagcgcgatgcctcgagacatcctgatggttgtggggaatgagattatagaggctcccatggcatggcgctcacgcttctttgagtaccgcgcatacaggtcaattatcaaagactacttccaccgtggtgccaagtggacaacggcccccaagcccacaatggctgacgaactgtatgaccaggactatcccatccattctgtggaagacagacacaaattggccgctcaggggaagttcgtgacaaccgagttcgagccttgctttgatgctgctgacttcattcgagctggaagagatatttttgcgcagagaagccaggttacaaactacctgggcatcgagtggatgcgtaggcatcttgccccagactacagagtgcatatcatctcgtttaaagaccccaatccaatgcatattgatgccaccttcaacatcattggacctggtcttgtgctctccaaccctgaccgtccatgccatcagattgatcttttcaagaaagcaggatggaccatagttacccctccaacacctgtgatccccgatgatcatcccctctggatgtcatccaagtggctctccatgaacgtcttaatgctagatgagaagcgcgtgatggtagacgccaatgaggtcccaattcagaagatgtttgagaagctgggtatcagcaccattaaggttaacattcgaaatgccaattccctaggaggaggcttccactgctggacctgcgacgtccgccgccgaggcacccttcagtcctactttgactgagcggccgtggtgtggcttggggcatagcctcagatatacctaagaagcagcaaggcccttctctcgctttaataaatgcatgaactgtagtgctttgaacaatcacctccttaacagggttcccaaacctgggttactttttgttgacataaggaaggataacttttgataggtcttactttcttctcctaaagttatttacaatttggcttcaaatataaaagttgagtaaatgtataccagggcagaaattagtcatttgagtaacttggccgctaatatttaaccatctacctctgtttttaatcttctttcctaaaggcagcttgaaatgtcggtcctaaccttgtcttcttttcctctttggtggacttgtgaatgttcatattacttcaaagacttaggagaaaaacacagaccctaagtagaaccagatatttgtctatttttcaaaaataattggatgttttttaaaattttgtttttaaataacctagactatgcaaacactggaaaaaaaatgaagtaacttttccatgaatgcttttaacattcttgtgtcaccatttggtactaaactctagtcctgcctcttacctcatttcaagtgggttttcctcccttccttccttccttcctcccttccttctttccttcctttcttccaaaaacttagagaagtgcttggtttaatagagtgaaacttgtagatcctattcctaaaggttgatgatgttcagtatcaacaggtaaaatggcatctttgttaatctgtcttgtttacatatatgcaaattatttaaggcatagagttttaaagcattttttaaaaactaatgcaggtaaaagaaatacatgtgacatgaaataattttaatgttggatattgtatatgtatttttattctaataaagttttgtgttccagattggaaaaaaaa

SEQ ID NO: 1049 - DNA, 1225 bp, Rattus norvegicus
  Genbank Accession No. NM_031044
aacccaatatggcatctttcatgaggagcttattttctgaccacagcagatatgttgaatcttttcggagatttctaaataattcaacggaacaccagtgcatgcaggaattcatggataagaagcttccaggcataatagcaaggattggagaaacaaaagcagaaattaagattctgagtataggcggaggtgcaggtgaaattgaccttcagattctctccaaagtccaggctcagtacccaggaatctgtattaacaatgaagttgtagagccaaatgccgaacaaattgtcaagtacaaagagcttgtagcaaagacatcaaacatggagaacataaaatttgcttggcataaggagacatcatctgaatatcaaaaacgtgtagtggaagaagacgaagaacctccaaagtgggactttattcatatgattcagatgctatattatgtaaaggatatcccagccaccctgaaattcttccacggtctcttagctgccaatgctaaaattctcattattcttgtgtcaggaactagtggctgggaaaagctatggaaaaaatatggattccgcctacccagggatgacctctgccagtatgtcacatcttctgatcttgctcagatactggacgacctgggtattaagtatgaatgttacgaccttttgtccactatggacataacagactgttttattgatggtaatgaaaatggagacctgctttgggattttttgacagaaacctgcaactttatcaaaacagcaccactggacctcaaagaggaaattatgaaagatcttcaagagcctgaatttagtgttaagaaagaggggaaggtacttttcaacaacaatctgagttttatagtggttgaggcaaatgtataagtcatgagtattcagaactcatattttgaccaaatgctgatttatttacatattaaatacatattatttaaatattgaagttaaaattaatcccataatagaatacaatattatttcttataaatgaaatctacaagtttccaagacaacttagactttctaagaactgagccacttccagttgtgaccttaaaagctaatactcaggctaaacactgcccaactggaaacatgagacttgagtttcattagcttactgatagtaaagttctttccattttcttagtgtactggaaatttttagaatagtaataaaatatgtgtcatcc

SEQ ID NO: 1050 - DNA, 551 bp, Rattus norvegicus
  Genbank Accession No. NM_031051
gggtcacgtagtcaggtcccagacttgggtcacaccgcacttaacaccgtcctccggccgtcgttcgcagtctctccgccaccatgcctatgttcatcgtgaacaccaatgttccccgcgcctccgtgccagaggggtttctctccgagctcacccagcagctggcgcaggccaccggcaagccggcacagtacatcgcagtgcacgtggtcccggaccagctcatgacttttagtggcacgagcgacccctgcgccctctgcagcctgcacagcatcggcaagatcggtggcgcccagaaccgcaactacagcaagctgctgtgcggcctgctgtccgatcgcctgcacatcagcccggaccgggtctacatcaactattacgacatgaacgcagccaacgtgggctggaacggttccaccttcgcttgagcccgggcctcacttacctgcaccgctgttcttcgagtcttgctgcacgccccgttctgtgtttatccacccgtaatgatggccaccttccggtcgggagaaataaatggtttgagacca

SEQ ID NO: 1051 - DNA, 2059 bp, Rattus norvegicus
  Genbank Accession No. NM_031057
ggcaggagaagtgatctgttatctcacctggcacatgaagcccattcctggaactatgcaaagggcagagtctggtgagccatggcggcggcagtggcggcagcagcagcagtgcggtcccggatcctgcaggtttcttctaaagtaaactccacatggtatccagcatcttctttctcttcatcatcagtgccaactgtaaagctcttcattgatgggaaattcgttgaatccaaaagtgacaaatggattgacatccacaacccagccaccaatgaggttgttggtcgggttcctcagtccaccaaagctgaaatggaggcagccgtagccgcctgcaaacgcgctttccctgcgtgggcagacacatctattttaagccggcagcaggtcctgcttcgttatcagcaactcattaaagaaaacctgaaagaaatcgccaggttaatcacattggaacaagggaagactctggctgatgctgaaggagatgtgttccgaggccttcaggtggttgagcatgcctgcagtgtgacgtccctcatgctgggagagaccatgccatctattaccaaagacatggacctttattcctaccgcctgcctctgggagtgtgtgcaggcatcgcaccatttaattttcctgccatgatccccctttggatgtttcccatggctatggtctgtggaaatactttcctaatgaaaccatcagagcgagtacctggagcaaccatgcttcttgctaagttgcttcaggattctggtgccccggacggaacactgaacatcatccatggacaacatgaagctgtaaattttatttgcgatcatccagacatcaaggcaatcagctttgtgggatccaaccaggcgggagagtacatcttcgaaagagggtcaagaaatggcaagagggttcaagccaatatgggagccaagaaccatggggtagtcatgccagatgccaataaggaaaataccctcaaccagctggttggggcagcatttggagctgctgggcagcgctgcatggctctttcaacagccgtccttgtgggagaagctaagaagtggctgccagaactggtagagcgtgccaagaatctccgcgtcaatgcaggagatcagcctggagctgatcttggtcccctgatcaccccccaggccaaagagagagtctgcaatctgattgatagtggagcaaaagagggggcttccatccttctggatgggcggaaaattaaagttaagggctacgaaaacggtaactttgttggaccaaccatcatctccaatgttaagccaagtatgacttgttacaaagaggagatttttggtccagttcttgtggtcttagagacagaaaccctggatgaagccatcaagattgttaatgacaacccatatggaaacgggactgctatctttaccaccaacggagccatagctcggaaatacgctcacatggtggatgtgggacaggtgggcgtgaatgtccccattccagtgcctttgccaatgttttccttcaccggctctcgatcttccttcaggggagacaccaatttctatggcaaacagggcatccagttttacactcagttaaagactatcacatctcagtggaaggaagaagatgctactctttcctcacctgcagtggtcatgcctaccatggggcgttagaacgttcaagactccatccagcctgagtaacttcccactgtccttggcaatcttcgtctgccatctttgctcaaaacagatccatgaggatggagtatattgcaatgaaattctttctcagaactcgcaatcccttcaaagttatagggagtacaggataacaccaacgccaggccttcacttgttctccatacttctctacggtttttgaggttaactgttgttaagcgtgaagtgtttgcctagaataagagcttagaactgtcttctaacaattcttttctgatgacttggagggacaacgtaggggcccggtccttggcaatcttcgtctgccatctttgctcaaaaacagtccatgaggatggag

SEQ ID NO: 1052 - DNA, 710 bp, Rattus norvegicus
  Genbank Accession No. NM_031065
cttttccggttcccgcagccgcagccatgagcagcaaagtttcacgcgacaccctctacgaggcggtgcgggaagtcctgcacgggaaccagcgtaagcgccgcaagtttctggagacggtggagctgcagatcagcctgaagaactacgaccctcagaaggacaaacgcttctcgggcaccgtcaggcttaagtccacccctcgccccaagttctccgtgtgcgtcctgggggaccagcagcactgtgatgaagccaaggccgtggatatcccccacatggacatcgaggcgctcaagaagcttaacaagaacaagaagttggtcaaaaagctggccaagaagtatgatgcctttttggcctccgagtctctgatcaagcaaatcccacgtatcctgggcccaggcctaaacaaggcgggcaagttcccctccctgctgacacacaatgaaaacatggtggccaaagtggatgaggtgaaatccacaatcaagttccagatgaagaaggtgctgtgtctggccgttgccgtcggccacgtgaagatgaccgatgacgagctagtctacaacatccacctggctgtcaacttcttggtgtccttactcaagaaaaactggcagaacgtccgggctctgtacatcaagagcaccatgggcaagccccagcgtctgtattaggacgctccaataaacctcgttgctgccttc

SEQ ID NO: 1053 - DNA, 1292 bp, Rattus norvegicus
  Genbank Accession No. NM_031095
tcctagtgttacaggacatggagaaggaacgggagacactgcaggtctggaagcaacgtgtgggacaagagctcgattctgtgatcgctttctggatggagcattcccatgaccaggaacacgggggcttcttcacatgccttggccgcgatgggcaggtatatgatcacctcaaatatgtctggctgcaggggaggcaggtatggatgtattgtcgcttataccgcacttttgagcgcttccgccgtgtcgagcttctggatgcagcaaaagcaggtggtgaatttttgttgagttatgcccgggtggcaccgcctggcaagaaatgtgcttttgtgctgacccaggacggccgtccagtgaaggtgcagcggaccattttcagcgagtgcttttacaccatggccatgaatgaactgtggaaagtaacaggggaaatgcattatcagagagaagccgtagagatgatggatcagatcatccactgggtaagggaggacccagctgggctgggccggcctcagctctcgggaacactggccacagagcccatggcagtgcccatgatgctgctcaacctggtggagcagcttggagaagaagatgaggagatgaccgacaagtatgcagaactaggggactggtgtgcccataggattcttcagcatgtccagagggatggacaagttgtactggagaatgtatcagaggatggcaaagagctccctggttgccttggaagacatcagaacccaggccacacactggaagctggctggtttctgctccagtatgccctcaggaaaggtgatcccaaacttcaaaggcacattattgacaagtttctcttactgcctttccactctggatgggaccctgagcacggaggcctcttctacttccaggatgctgatgatctctgccctacccagctggaatggaacatgaagctgtggtggccacacactgaagccatgattgccttcctcatgggttacagggacagcggggacccagccttgctgaacctcttctaccaagtggctgaatacaccttccaccagtttcgtgatcctgagtacggggaatggtttggctacctgaaccaagagggaaaggtggcccttaccatcaaaggaggtccttttaaaggctgcttccatgtgccgcggtgcctggccatgtgcgagcagattttgggagccctactccaacgccttgggcccgcccccctcggctccttgcccgctgtccccactcgcgaaggctcgaaataaagctgaccctgttcc

SEQ ID NO: 1054 - DNA, 722 bp, Rattus norvegicus
  Genbank Accession No. NM_031101
tcctttccgctcggccgttctcctgtacaggaggcagccatggcgcccagccggaatggcatgatcctgaagccccacttccacaaggactggcagcagcgagtggacacgtggttcaaccagccggcccgcaagatccgcagacgcaaggcccggcaggcgaaagcgcgccgcatcgcccctcgccccgcgtccggtcccatcagccccatcgtgaggtgccctacagttagataccacaccaaggtccgggctggcaggggcttcagcctggaggagctcagggtggctggtatccacaagaaaatggcacgcaccatcggcatctccgtggacccaaggaggcgaaacaaatccacggagtcactgcaggccaacgtgcagcgcctgaaggagtaccgctccaagctcatacttttccccaggaagccttctgctccgaagaagggagacagttctgctgaagaacttaaattggccacgcagctaacaggacctgtgatgcccatccggaatgtgtacaaaaaggagaaggccagagccatcacggaagaggagaagaactttaaggctttcgccagccttcgcatggcccgagccaatgcccggctcttcggcatccgagcaaagagggcgaaagaagccgcagagcaagacgttgagaagaagaaataatgcgcggctggagagttgtaataaattttccataaagcaaaaaaaaa

SEQ ID NO: 1055 - DNA, 465 bp, Rattus norvegicus
  Genbank Accession No. NM_031104
ctcctctgccgccatggctcctgtgaaaaagcttgtggcgaaggggggcaaaaaaaagaagcaggttttgaagttcacccttgactgcactcaccctgtagaagatggaatcatggatgctgccaattttgagcagttcctccaggagaggatcaaggtgaacgggaaagctggtaaccttggcggaggggttgtgaccatcgagcggagcaagagcaagatcactgtcacttccgaggagcctttctccaaaaggtatttgaaatatctcaccaaaaaatatttgaagaagaacaacctccgagactggctgcgcgtcgttgccaacagcaaggagagctacgagctgcgctacttccagatcaaccaggacgaggaggaggaggaggacgaggattaagacacattggtctgccatgttttgtattaattcataaataaaatttaggaacaaaaaaaaaaaaa

SEQ ID NO: 1056 - DNA, 688 bp, Rattus norvegicus
  Genbank Accession No. NM_031108
ggcgcagcgggcctagcctagtcaacatgccggtcgccagaagctgggtttgtcgcaaaacctatgtgaccccacggagacccttcgagaaatcgcgtctcgaccaggagctaaagttgattggagagtatggactccggaacaaacgtgaggtgtggagggtcaaatttaccctggcgaagattcgtaaggctgcccgggagctgttgacgctggacgagaaggatcctcggcgtctgtttgaaggcaacgctctgctgagacgacttgttcgaattggggtgctggatgagggcaagatgaagctggattacattctgggcctgaagattgaggatttcttggagagaaggctgcagacccaggtctttaagctgggcctggccaaatctattcaccatgcccgtgtgctcatccgccaacgtcacatcagggtcctcaagcaggtggtgaacatcccatctttcattgttcgcctggactctcagaagcacattgacttttccctcctttctccttatggtggtggccgcccaggacgagtgaagaggaagaatgccaagaaaggccagggtggtgctggagctggtgatgatgaggaagaggattaattaattaattaataccttgttgcactggaggattgtctagttttcccgttgacaaataaaacagaattgatacttga

SEQ ID NO: 1057 - DNA, 466 bp, Rattus norvegicus
  Genbank Accession No. NM_031112
tcctcctttacagctcgggcaccgtagccatcatgaatgacacggtaaccatccggaccaggaagttcatgacaaaccgtctgcttcagaggaaacagatggtcattgatgtccttcatcctgggaaggccacagtaccaaagacagaaattcgggaaaagctggccaagatgtacaaaaccacaccagatgtcatctttgtatttggattcagaacccactttggtggaggcaagacaactggctttggcatgatctatgattctttagattatgcaaagaagaatgagcctaaacacagacttgcgagacatggcctttatgagaagaaaaagacctcccgcaaacagcgaaaagaacgaaagaacagaatgaagaaggtcagggggactgcaaaggccaatgttggtgctggcaaaaagccaaaggagtagttctacggtgacttgatgttctgctgtgatat

SEQ ID NO: 1058 - DNA, 573 bp, Rattus norvegicus
  Genbank Accession No. NM_031114
aagactgcagcgcctcagggcccaggtttcaacagattcttcaaaatgccatcccaaatggagcatgccatggaaaccatgatgcttacatttcacaggtttgcaggggaaaaaaactacttgacaaaggaggacctgagagtgctcatggaaagggagttccctgggtttttggaaaatcaaaaggaccctctggctgtggacaaaataatgaaagacctggaccagtgccgagatggaaaagtgggcttccagagctttctatcactagtggcggggctcatcattgcatgcaatgactattttgtagtacacatgaagcagaagaagtaggccaactggagccctggtacccacaccttgatgcgtcctctcccatggggtcaactgaggaatctgccccactgcttcctgtgagcagatcaggacccttaggaaatgtgcaaataacatccaactccaattcgacaagcagagaaagaaaagttaatccaatgacagaggagctttcgagttttatattgtttgcatccggttgccctcaataaagaaagtctttttttttaagttccg

SEQ ID NO: 1059 - DNA, 1777 bp, Rattus norvegicus
  Genbank Accession No. NM_031127
cagcctcaccttttctgatgataactcaaggactcggggatggaaagtcatggggaccctgataggccttggtgccgtgctggcctatcatgaccatcggtgtagggcttctcaggagtcaccacggatatactctaaagaggatgtgcgttctcacaacaaccttcaaactggagtctgggtaactctaggctctgaggtcttcgatgtcacaaaatttgtggacctgcatccaggaggacaatcaaaactgatgctagctgctggaggtcccctagaacccttctgggccctctatgctgttcacaaccagccccatgtacgtgagttactggctgagtataagattggggagctgaaccccgaagatagaatgtcccctcccttggaggcctctgacccttattccaatgaccctatgcgtcatccagccctgaggattaatagccagcgcccctttaatgcagagcctcctcctgaactgcttacagaaagctacatcacaccaaaccctattttctttacccggaaccatctgcctgtacctaacctggacccagacacctatcgcttgcatgtagtaggggcacctggaggtcagtcgctctctctctccttggatgatttgcataagttccccaaacatgaggtcactgtcactctgcagtgtgctggtaaccggcgctcggagatgaataaggtcaaggaagtgaaaggtctggagtggagaacaggggccatcagcacggcacgctgggccggggcacggctctgtgatgtcttagcccaggctggtcaccgactccgtgaaaccgaggcccatgtctgttttgaaggactggattcagaccccactggaactgcctatggggcatccatccctctggctcgggccatggatccccaagccgaggtcctcctggcttatgagatgaatggtcagcctctgcctcgtgaccatggcttccccgtaagggtggtggttcctggtgtggtaggtgctcgccatgtcaagtggttgggcagagtgagtgtggagtcagaggaaagttatagtcactggcagaggcgggattacaaaggcttttctccatctgtggactgggacactgtagactttgatctagccccatcaattcaggaactacccatccagtcagctatcacacagcctcaagatgggacgactgtagaatcaggagaggtgattatcaagggctatgcatggagtggtggtggtagggctgtgattcgagtggatgtgtctatggatggtggactgacctggcaggaagctgagctggagggagaggaacagcatcccaggaaggcctgggcttggcgaatatggcagttgaaagctcacgtgccagctgagcagaaggaattgaacatcatttgtaaagcggtagatgacagttacaatgtgcagccagacactgtggccccaatctggaaccttcgaggcgtgctcagcaatgcctggcaccgtgtccacgttcaggtggttccatgaaagcatggaacagcagtttgtacccaaaggacccctacacctctttaccaacccagccttaatcctcggtgccatagataaacgtttccttcctctactgaggggagaaagcagctctcaagacatcactttcttaccctaccatacctttacttctcatgcctcccctcaggccttgttttgcattgcttagattcttcagatatgtgtgtgatgtatggaatgtgtaaaaactgtacgttatttctttttcttcttccc

SEQ ID NO: 1060 - DNA, 4566 bp, Rattus norvegicus
  Genbank Accession No. NM_031137
ccagcttgcgtccatggccaccgctgcgaccgaggagcctttccctttccatggtcttctaccaaagaaagagactggggcctcctccttcctgtgccgctacccggagtatgacggacgcggggtgctcatcgccgtcctggacacaggggttgatcccggggccccgggcatgcaggtcacgactgatgggaaaccaaaaatcattgatatcattgatacaacaggaagtggtgatgtgaatactgctacagaagtagaaccaaaagatggcgaaatcactggtctttctggaagagtgcttaagattcctgcaaactggacaaatccttcaggaaaatatcatattggcattaaaaatggttatgacttctatccaaaggctctcaaggaaaggatacagaaagaacggaaggaaaaaatctgggatccaattcacagagttgcgcttgcagaagcttgtagaaaacaagaagaatttgatattgccaataatggctcttcccaagccaataaactaatcaaggaagagttgcagagtcaagtggaattacttaattcttttgagaaaaagtatagtgatccaggccctgtgtatgactgcttggtgtggcatgatggtgagacctggagagcctgtgttgattcgaatgaaaatggggacttgggtaaatctactgtattgagaaactacaaagaggctcaagaatatggttcttttggcacagctgagatgctgaattactctgttaatatttatgatgatggaaacctgctctccattgtgaccagtggaggagctcatggaacccatgtagcgagtatagctgctgggcattttccagaagagcctgaacggaatggagttgctcctggtgctcaaattctatccattaagattggtgatacaaggctaagcaccatggaaacaggcacaggcctcatcagagctatgatagaagttataaatcataagtgtgatcttgtcaactacagttatggagaagcaactcattggccaaattctgggagaatttgtgaagtaattaatgaagcagtatggaaacataatacaatttatgtttcaagtgctggaaataatggtccatgcctttctacagtgggttgtccaggaggaactacttccagcgtgataggtgttggagcttatgtttctcctgatatgatggttgcagagtattcactgagagagaaactacctgcaaatcaatatacatggtcttctagaggcccaagtgctgatggggcccttggtgtgagcatcagtgcaccaggaggtgctattgcttctgtgcctaactggacattgagggggactcagctaatgaatgggacatcaatgtcttcccccaatgcctgtggtggcattgccctggtactttcagggctgaaagcaaataatgttgactatactgttcactcagtcagaagagctctagaaaacactgcaataaaagctgacaatatagaagtatttgcccaaggacatggaattattcaggttgacaaagcttatgactacctcattcagaatacatcatttgctaacagattaggttttacagttacagttggaaataaccgtggcatctacctccgagatcctgttcaggtggctgctccttcagatcatggtgttggcattgagcctgtatttccagagaacacagaaaactctgaaaaaatatccttccagcttcatttagctttaacttcaaattcatcttgggttcaatgtcccagccatttggaactcatgaatcaatgtcggcacataaacatacgtgtggaccccaggggcttaagagaagggttacattatacagaggtatgtgggtatgatatagcatcccccaatgcaggtcctttattcagagttccaatcactgcagttatagcagcaaaagtaaatgaatcatcacattatgatctagcctttacagatgtacattttaaacctggtcagattcgaagacattttgttgaggttcctgagggggcaacttgggctgaagttaccgtgtgttcgtgttcttctgaggtatcagcaaaatttgttcttcatgcagtacagcttgtgaagcagagagcatatcgaagtcatgaattttataagttttgttcccttccagaaaaaggaacactcattgaagcctttcctgttctgggtgggaaagcaattgaattttgtattgctcgttggtgggcaagtctcagtgatgtcaatattgattataccatatcattccatggcatagtgtgtactgcaccacagttaaacattcatgcatctgaaggaatcaatcgttttgatgtccagtcctctttaaaatatgaagatctggctccttgcataactttgaagagctgggtgcaaacactacgcccagtaaatgcaaaaaccagacctttaggatcaagagatgttttgccaaataatcgccagctttatgagatggtcctgacatacagctttcatcagcccaagagcggagaagtaacacctagttgtccactcctttgtgaattattatatgagtcagaatttgacagtcagttgtggattatttttgaccagaacaaaagacagatgggctcaggcgatgcctatccacatcagtattctttgaaattggagaaaggagattatacgattcgattacagattcgtcatgagcaaatcagtgatttggatcgtctcaaagatcttccgtttattgtttcgcataggttgtctaataccttgagcttagatattcatgaaaatcatagccttgcacttctaggaaagaagaaatcaagcagtttgacattaccacccaaatataatcagccattctttgttacttccttacctgatgataaaatacctaagggggcaggacccggatgctaccttgcaggctccttgacattgtcaaagactgagcttggaaagaaagctgatgtgatccctgttcattactatctaatacctccaccaacaaagactaagaatggcagcaaagataaagaaaaggattcagaaaaagagaaagatttgaaagaagagtttactgaagctttacgagatcttaaaattcagtggatgaccaagctggattctactgacatttacaatgaattgaaagaaacatatcctgcttaccttcctttgtatgttgcacgtcttcatcaattagatgctgaaaaggagcggatgaaaagacttaatgaaattgttgatgctgccaatgctgttatttctcacatcgatcagaccgctctcgctgtttacattgccatgaagactgaccccaggcctgatgcagctactataaaaaatgatatggacaagcagaaatctaccctggtagatgccctctgcaggaaaggatgtgctctggcagaccaccttcttcatgcacagccccacgatggggcagcagctggagatgcagaagcaaaagaagaggaaggagaaagtaccttggaatctctatcagaaacctattgggaaactacaaagtggacagatctttttgacactaaggttttgacatttgcatacaagcatgcattagtaaataagatgtacgggagaggccttaagtttgcaaccaaactcgtagaagaaaaaccaacaaaagaaaactggaaaaattgtattcaactgatgaaattactcggatggacccattgtgcgtcttttactgaaaactggctccccatcatgtatcctcctgattattgtgtattctaaaatgggaaccaaaacgttaaatttcgaaagcagaaaattttatagtgaacaaatatatgaacaaatgtgtggcatttctagtctaactaatgcatgtcttcatccactatcgaatactgatcattaaaactctatgtatttatcagagaactcaatggtgtgtggcttcatacatgtaatgtagacagacctctgacatcatgctgctttcctgctgcctcccacacttggctagggagggcagagcctgcctgccagccccaacctgggtggatgcagctgctcactgcaggagaggttttcatctcttaatttttaactgtaaaacgtcatccagtttttattttataaatcaaaaaggttaaaacatgctaaatttttccaattatatagaggccttaaaaatgctacattgggtgtagctaaattatttatttgactaaaaattacgagaacataatttccagacttctaaaaataaattcaattaatgggtatggtggggaggtataaatacatggcaactgggaaaagaaacgtgttaatgtaatcttcactccggagtcacaacaagcaagttgtttttacagcatcctcaagtacacagcatcagaataagttaaaatttcatgtgttggtgccagacagttgaatctatctggttttgtaaagatatacacagtatgtttataacattgaaatcatgtaaaatacatgaataaatgtgcaaaacaacaggcacagcacaccatatgcactctgatacctgttttttataaataaaagtaaatattgaagctaaa

SEQ ID NO: 1061 - DNA, 1737 bp, Rattus norvegicus
  Genbank Accession No. NM_031138
  misc_feature (1)..(1737): n = a or c or g or t
ggggcagctgcggagcatgtcgaccccggcccgtaggaggctcatgcgggatttcaagcgattgcaagaggacccacctgtgggggtcagtggtgcaccatctgaaaacaacatcatgcagtggaacgcagttatatttggaccagaagggacaccctttgaagatggtacttttaaactagtaatagaattttctgaagaatatccaaataaaccaccaaccgttaggtttttatccaaaatgtttcatccaaatgtgtatgctgacggcagcatatgcttagacatcctgcagaaccgatggagccccacgtacgacgtctcctccatcttaacttcaattcagtctctgttggatgagccgaatccaaacagtccggccaatagccaagcagcacagctttatcaggaaaacaaacgggagtatgagaagagggtttcggccattgttgagcagagctggaatgactcataatagacacctggtctgtccacctttccatcgtcgttgtgtataatttacctcccagtaggaaggctagcaagttttaagtgccacgggttttaaggattctgcagagaaaaaagaaaaagtccttcagtttagaacctacaaaagcttgtgtatcttgattaatgtactttttattgcatggtgtgaactaagttattgctgcataaatttgtaatatatcctgtttgtatttttttccaagtgtataatgttggtgtggagttttcatgacagaatatacacattttgtaaatctgtacttttttcaaatattgaatgccttatttttgaattctttagatttttaaattggagaaaagcacttaaagttttttatatatgaatattacatgtaaagctgttaaaatacataacttcagtgcaaaaaaacaggcatctggactcaatggtacctgattaagcccattcctctcagacacttggatgggagacccacacctggactcttttgagcttcagttgatggaattagtgcagcttgagtcagctcaacggggtctctgtgacttgtcctccttcttctgagaccttgcctgtgaaagtattcaaaacacctgcagtattgcctttagcgagttctcatagcaaaggacatagggtgggtgggactggattcgcaggtgaaattaaacctgacagggccgtgtgtttgcattttaatttgatatactcctgaacagtccatctctgacatgctctgccacaacccttctgtgtgtttccttagttactgctaccaaatatccgtgcagccctgcattactgtttccctgggtaccgctcatccccagcccctgaaagccccctggaggtggggaagctgtccccgttgcattcatcttacacacttgcaggctagcgcatgccacacgctctattagtactggtggcttgagtaaataagcaagttcacagctatcgccctctgcagtgcttcaaacactaatgtcttctaacaaatacaactttagtgatcactttgatgccattgaacatgaaacaggtttcttgttgatactagaagatatgtcagaggactcattcaagcctcttctcctgtttttttcgtgacacacatcgataagaagctgattttttttagactaaaatgcataacttaaaatatcttgngaattttttttaaaaggaagggatagaaaaaatatgtcatgaagaaggagaaaaaaaaaaaaaaaaaaaaa

SEQ ID NO: 1062 - DNA, 1796 bp, Rattus norvegicus
  Genbank Accession No. NM_031140
gttcacagccactgcgccctcgctctcttcttgcagatcttgcagccgcagcaagccaggccacctcgtccttcgaagccatgtccaccaggtccgtgtcctcgtcctcctaccgcaggatgttcggtggctccggcacatcgagccggcccagctccaaccggagctatgtgaccacatccacccgcacctacagcctaggcagcgcgctgcgccccagcactagccgcagcctctattcctcgtccccgggtggcgcctatgtgacccggtcctccgccgtgcgcctgcggagcagcatgcccggcgtgcggctgctgcaggactccgtggacttctcgctggccgacgccatcaacaccgagttcaagaacacccgcaccaacgagaaggtggaattgcaggagctgaatgaccgcttcgccaactacatcgacaaggtgcgcttcctcgagcagcagaacaaaatcctgctggccgagctcgagcagcttaagggccagggcaagtcgcgcctgggcgacctctacgaggaggagatgagggagttgcgccggcaggtggatcagctcaccaatgacaaggcccgtgtcgaggtggagagggacaacctggccgaggacatcatgcggctgcgagaaaaattgcaggaggagatgctccagagggaggaagccgagagcaccctgcagtcattcagacaggatgttgacaatgcttctctggcacgtcttgaccttgaacgtaaagtggaatccttgcaggaagaaattgcctttttgaagaagctgcacgatgaagagatccaggagctgcaggcccagattcaggaacagcatgtccagatcgatgtggacgtttccaagcctgacctcaccgctgccctgcgtgatgtccgccagcagtatgaaagtgtggctgccaagaacctccaggaggccgaggaatggtacaagtccaagtttgctgacctctctgaggctgccaaccggaacaacgatgccctgcgccaggcaaagcaggagtcaaacgaataccggagacaggtgcagtcactcacctgcgaagtggatgcccttaaaggcactaatgagtccctggagcgccagatgcgtgaaatggaagagaattttgcccttgaagctgctaactaccaggacactattggccgcctgcaggatgagatccagaacatgaaggaagagatggctcgccaccttcgtgaataccaggacctgctcaatgtaaagatggctcttgacattgagatcgccacctacaggaagctgctggaaggggaggagagcaggatttctctgcctcttccaaacttttcttccctgaacctgagagaaactaacctggagtcacttcctctggttgacacccactccaaaagaacactcctgattaagacggttgaaaccagagacggacaggtgatcaatgagacttctcagcaccacgatgaccttgaataaaaactgcacaggctcagtgcaacggcgcagtaccagcaagaaggaaaaaaaaatcgtatcttagaaaaaagagctttcaagtgcctttactgcagttttcaggagcgcaagatagatctgggatagaaacgagctcagcacataacaactgacacccccaaaaggcgtagaaaaggtttacaaaataatctagttttacgaagaaatcttgtgctagaatactttttaaagtatttttgaataccattaaaactgctttctttttccagaaaatatctgaccaacttgttactgcttcaataaaacttcagaaat

SEQ ID NO: 1063 - DNA, 1531 bp, Rattus norvegicus
  Genbank Accession No. NM_031237
ctctgggcgaagcgcggatataagtagctggtggctctgccaccccaccctgcccggatcgcgacggttttcagggttctggaatcagcagggttcctctgaggccttggcgagtggctgatctgctccgtttttgcaaaaggcgcctgtgtctggcagagccggtgtgagaagaagagagaatccttccccgccgccgggataatcaagagttttggccggacctttgagtacacatcgggatagtgagaagcccggcgaaaagcacagactatggcgctgaaacggattaataaggaacttagtgatttggcccgtgaccctccagcacaatgttctgcaggtccagttggagatgacatgtttcattggcaagccacaattatgggacctaatgacagcccatatcaaggtggtgtattctttttgacaattcattttcctacagactaccccttcaaaccacctaaggttgcatttacaacaagaatttatcatccaaatattaacagtaatggcagcatttgtcttgatattctaagatcacagtggtctcctgctttaactatttctaaagttcttttatccatttgttcactgctatgtgatccaaacccagatgaccccctagtgccagagattgcacggatctataaaacagacagagacaagtacaacagaatatctcgggaatggactcagaagtatgccatgtgatgctaccttaaagtcagaataacctgcattatagctggaataaactttaaattactgttccttttttgattttcttatccggctgctcccctatcagacctcatcttttttaattttattttttgtttccctccctccattcattcacatgctcatctgagaagacctaagttcttccagctttggacaataactgcttttagaaactgtaaagtagttacaagagaacagttgcccaagattcagaaatttttttaaaactggagcatgtgtattatgtggccaatgtcttcactctaacttggttatgagactaaaccaatcctcactgctctaacatgctgaagaagccatctgagggggagggggatggatgctgagctgtcacatcaaaggaaacagcattattccagcagcatccattcttgtctaaaccttccactgttagagatttgaggttacatgatatactttatgctcataactgatgtggctggagaattggtattgaattatagcatcagcagaacagaaaatgtgatgtattttatgcatgtcaataaaggaatgacctgttcttgttctacagagaatggaaattggaagtcaaacaccctttgtattccaaaatagggtctcaaaacattttgtaattttcatttaaattgttaggcttggagctattagttaatctatcttccaatactgtttaatatagcactgaataaatgatgcgagttgtcaatggatgagtgatcaactaatagctctcctagtaattgatttatttttcttcaataaagttgcataaacc

SEQ ID NO: 1064 - DNA, 1591 bp, Rattus norvegicus
  Genbank Accession No. NM_031315
cggctcgaaatggaggcgactctgagcctggggcccgccggccgcagctgctgggatgagccgctgagcatcaccgtgcgcggcctggtccccgagcagcccgtcacgctgcgcgcggccctgcgcgacgagaagggcgcgctcttccgagcccgcgcgctctaccgcgccgatgcccacggagagctggacctggcgcgcgcgcccgctctggggggcagcttcacggggctcgagcccatggggctgctctgggccatggagcccgaacggcctttctggcgcttggtcaagcgcgacgtgcagacgcccttcgtggtggagctggaggtgctggacggacacaaacccgacggcgggcggctgctggcgcgggcggtgcacgagcgtcacttcatggctcccggggtgcggcgggtgcccgtgcgcgagggcagggtgcgcgccacgctcttcctgcccccagaacctgggccctttcctggaatcataaacctttttggagttggaggcggccttctggagtaccgggcgagtctgctggctgggaagggttttgccgtcatggctctggcttattacaactacgacgacctccccaagaccatggaaaccatgcgcattgagtactttgaagaagccgtgaactacctgcgtggccaccctgaggtaaaaggaccaggaattgggctgcttgggatttccaaagggggtgaacttggccttgctatggcctccttcctgaagggcatcacggctgctgttgtcatcaatggctccgtggctgctgttgggaacaccatatgctacaaggatgagactataccccctgtgactatcctgagaaaccaggtcaaaatgaccaaggatggcctcaaggatgttgtagatgctttgcaaagccctctggtagaacagaagagcttcatccctgtggaaaggtctgacacgaccttcctgttcctcgttggtcaggatgaccacaactggaagagcgagttctatgccaatgagatctccaaacgcttgcaggcccacgggaaagagaagccccagatcatttgctacccagaagcagggcactatatcgagcctccttacttcccactgtgcagcgctggcatgcacctcctggtgggtgctaacatcacctttggaggggagcctaagcctcactctgtggcccagttggatgcatggcagcaactccagactttcttccacaaacagttgggtggtaagagtcatggggtgtcccctaaaatataacctgttatgtgatggttttggcaggaaaagtacaaatactttgtaggaatatcagttcagattacttcatctgaacatataaccgcttttggtttacatttttaaaaattaattttagtatcaaaatagtgctgattcaaaggctggaaatatagttcagttgtagagtccttgactgactcatgcaagttcctgggttcaatctccgtgctgtaagggaaaagagcacattttatggaaactgtagctattcaagaaatagtgcctagaatttaaaggaaccatgagtaaacactcttatgtaacttaaaaaaaaaaaaaa

SEQ ID NO: 1065 - DNA, 698 bp, Rattus norvegicus
  Genbank Accession No. NM_031318
gcgctagagggaagatggaagacttccaggcctccgaggagactgcatttgttgtggatgaagtgagcaacattgtaaaggaggctatagaaagtgccatcggcggtaacgcctaccagcacagcaaagtcaaccagtggaccactaatgttgtagaacagactttgagccaactcaccaaactggggaaaccatttaaatacattgtgacctgtgtgatcatgcagaagaatggtgctgggttacacaccgcaagttcctgcttctgggacagctccacggacgggagctgcacagtccgatgggagaacaagaccatgtactgcatcgtcagtgccttcggactgtccatctgaccgcctgactgcctcagcctccggttccagcgtttctagtccatcttaccaccagctatgttgggcggataccttcctcctctttaagttgttctgaggcactcccaaaatgtagagaaataaaccaaatgaccctggccacaggaaccacacgacggacactaggcagatgagcagccacctgtcatccaaggcaggcagtaccagttgtcttaactgtcttctcaaaggtgctaagatctcaagtctgctagtggaaacttctctactttctgaaatgattcagatacactaattttccacactttatacttttgttagaataataaattattcagaatt

SEQ ID NO: 1066 - DNA, 2743 bp, Rattus norvegicus
  Genbank Accession No. NM_031324
cgcgcctgtaacgttcgcccgtgcacgcccggcccgccagctgtccgcctgctcgcacgccgccgtccgccgcagtccgcgcccagccttgcccgctctccccctccttcggcccacgcccggctccggccatgctgtccttccagtaccctgacgtgtaccgcgacgagacctcagtacaggattatcatggacataaaatttgcgacccttatgcttggcttgaagacccagacagtgaacagacaaaggctttcgtggaggcacagaacaagatcacagtgccgtttcttgagcagtgtccaatcagaggtctatacaaggagaggatgactgagctgtatgactaccccaagtacagctgccacttcaagaaaggaaagcggtatttttatttttacaatacaggtttgcagaaccagcgagtattatatgtacaggactccttagagggggaagccagagtgttcctggatcccaacactctgtcggatgacggcacggtggcactccgaggttatgccttcagcgaagatggtgaatacttcgcctatggtctgagcgccagcggctcagactgggtgaccatcaagttcatgaaggtcgacggtgccaaagagcttcccgacgtgctggagagagtcaagttcacctgtatggcctggacgcacgatggcaaaggaatgttctacaactcatacccacagcaggacggcaagagcgacggcacagagacgtccaccaatctccaccagaagctctgttatcacgtcttggggacggatcagtcagaagacgttctgtgtgccgagttccccgatgagcctaaatggatgggaggagccgagttatccgatgacggtcgctatgtcttgttatcgatctgggagggatgtgatccagtgaatcggctgtggtactgtgacctccagcagggatccaatggtatcaacgggatcctgaagtgggtaaaactgatagacaactttgaaggggagtacgattacataaccaacgagggtacggtgttcaccttcaagaccaaccgcaactcccccaattaccggctgatcaacatcgacttcacggaccccgacgagtccaagtggaaagttctcgttccggagcacgagaaagatgtcttagagtgggtggcttgcgtcaggtccaacttcctggtcttgtgctacctccgcaacgtgaagaacattctgcagcttcacgacctgacaactggtgctctcctcaagaccttcccgctggacgtgggcagcgtggtggggtacagtgggcgcaagaaggactctgagatcttctaccagttcacatccttcttatctccaggtgtcatttaccactgtgatcttaccagagaggaactggaaccccgggttttccgagaggtgacggtgaagggaatcgatgcgtctgattaccagactatccaggttttctaccctagcaaggatggcacaaagattcccatgtttattgtgcataaaaagggcataaagttggatggctcgcatcccgctttcctgtatggctatggtggcttcaacatctccatcacacccaactacagtgtgtccaggctcatttttgtgagacatatgggcggcgtcctcgcggtagctaacatcagaggcggtggtgaatacggagaaacatggcataaaggtgggatcttggccaacaagcagaactgctttgatgacttccagtgtgctgctgagtacctcatcaaggaaggctacacaacttccaagaggctcacgatcaatggaggctccaatggcggcctcttagtggctgcttgcgcaaatcagcgcccggacctcttcggctgtgtgatcgcccaggttggagtgatggacatgttgaagttccacaaatttactattggccatgcctggaccactgattacgggtgctccgacagcaaacaacacttcgaatggcttctcaagtactcgccgctgcacaacgtgaagcttccggaggcggatgacatccagtacccgtccatgctcctcctcacggctgaccacgacgaccgcgtggtcccgctgcactcgctcaagttcatcgccacgcttcagtacatcgtgggccgcagccggaagcagagcaaccccctgctcatccacgtggacaccaaggccggccacgggccgggaaaacccaccgccaaggtgatagaagaagtctcggatatgtttgcgttcatagcgcggtgcctgaacatcgagtggatccagtaagtggggattcccggcccctcccaccagacacagaaaacctcaagggctttttcacaccatcctgaccaagaaaccaccggcgaacgctgcctggagtgagcaccgtgccgctgctcacagacagcaagccgccgagcaggactgccaccgggattttagcttttctatctcctttctagcaagcccttgatgttttggttttgttttgttttgttttccccactctctccaggcacatatattgaaagggggggaaagggagggtatgtttatataagaaactaaatggcagtgaacgtattgtgaatatcagagccctgaactcgtaaagggatctaagttaagggtcatagttgggcatactcatctataatagcataatgaagtcacgtctctaaccatagcatataaccttaaataagtgggagacctcaaggcagagtccgctgcattactaataaatgctactgaagagtggg

SEQ ID NO: 1067 - DNA, 2318 bp, Rattus norvegicus
  Genbank Accession No. NM_031325
ggagcggcgggcggagaggtgtgtggagcttgtggcttgggaggaaggcgctgtccgagagaacgtgatctgcgcggccgctgtgtcctggccttggaagtggttcagtcatggttgagatcaagaagatctgttgcattggtgcgggctacgtcggcggacccacatgcagtgtcattgctcgcatgtgccctgaaatcagggtaacggttgtggatgtcaatgaggccaggatcaatgcatggaattctccaacgcttcctatttatgagcctggactaaaagaagtagtcgaatcctgtcgagggaaaaacctctttttttctaccaatattgatgatgccatcagagaagccgatctagtgtttatttctgtgaacacaccaacaaaaacatatggaatgggaaaaggccgggcggcagatctgaagtatatcgaagcttgtgctcgccgcattgtgcagaactcaaatgggtacaaaattgtgactgagaaaagcacagtccctgtgcgggcagcggaaagcatccgccgcatatttgatgccaacacaaagcccaacttgaatctacaggttctgtccaatcctgagttcttggcagagggaacagccatcaaggacctaaagaacccagacagagtcctgattggaggggatgagaccccagagggccagagagctgttcaggcactctgtgctgtgtacgagcactgggttcccaaggaaaagatcctcaccaccaacacttggtcctcagagctttccaaactggcagccaatgcttttcttgcccagaggatcagcagcattaactccataagtgctctgtgtgaaagcacaggcgccgatgtggaagaggtggcaacggctatcgggatggaccaaagaattggaaataagtttctaaaagccagcgttggttttggtgggggctgcttccaaaaagatgttctgaatttggtttatctctgtgaggctctgaatctgcccgaagtagctcgttactggcagcaggtcatagacatgaatgactaccagaggaggaggtttgcatcacggatcatagacagcctgtttaatacagtgactgataagaagatagctatcttggggtttgcgttcaaaaaggatactggtgataccagggagtcctccagtatctacattagcaaatacctgatggacgagggtgcgcacctccacatctacgaccccaaagtacccagggagcagatagtggtggatctttctcatccaggcgtctcagcggatgaccaagtgtccagactggtgaccatttccaaggatccatatgaagcatgtgatggcgcccatgccctcgttatctgcacagagtgggacatgtttaaggaactggattatgaacggattcataaaagaatgctgaagccagccttcatatttgatggccggcgtgtcctggatgggctccacaatgagctacagaccattggcttccagattgaaacaattggcaaaaaggtatcttccaagagaattccatacactcctggtgaaattccaaagtttagtcttcaggatccacctaacaagaagcccaaagtctagacgtcgcccttttgcctgtgatgatttggtactgcagggtagccagcgtctgtctgatactaagtggtaaatgaactacgtgtttttatggaaacaaaaatatttttgtaatcatcaaatttatactagctatctgggtgttagcatatctagtaattatgagtctagaataatttttatatatttttatattattgtactctcagttactgaatggatggaaaacaatcatgttggtttaaatgtcagtttttataaataaaaatgaaaccttgaattttttagcattacaggttgttacagactgcactgtaataacacaagggaaaggcagtctcatttccctacctgttgtctctgcttatcactaaatgggacttcgaagccgtgaaatcactgtgctaggatggctgatgaaggtctctggacttttgttttaatgagattatgtcattagtggttttagttgtctttgtgtctcccaaaaccactctgtctttctctccatgcgtaactcgggcagtgctttcttttttgaaaattcagcctgaggaggaaatcagtctatggtctagttcgtcctgcctcttagcttctgtacctgcttgtcacatttgcacctatgagtcaagatatgtttgttacctttattttgatttatttctattacaattcaatttttttcctttaattaagaaaaccaataaagtctcatgtgtaaactgg

SEQ ID NO: 1068 - DNA, 3061 bp, Rattus norvegicus
  Genbank Accession No. NM_031330
tgtgaccgcggccaagcccgctcgccttctgcggcgagtagggcctcgcggcgtcatcggcggcgaggagccgctgcggcctggccgaccatgtcggacgcggctgaggagcagcccatggagacgacgggcgccaccgagaacggacacgaggccgcccccgaaggcgaggccccggtcgagcctagccctggcagcggccccgcgactccggcggggtctgtgggcgggaccacggccgccccgagcgggaaccagaacggcgccgaaggcgaccagatcaacgccagcaagaacgaggaggacgcgggaaaaatgttcgttggtggtctgagctgggataccagcaaaaaagatctaaaggattattttactaagtttggagaggtcgttgactgtacaataaaaatggatccgaacactggtcgatcaagagggtttgggtttattctcttcaaagattcttctagtgtggagaaggtcttagatcagaaggagcacagactggatggtcgtgtcattgaccctaaaaaggctatggctatgaagaaggaccctgtgaagaaaatctttgtgggaggtctaaaccctgaagccacagaggaaaagatcagagaatactttggccagtttggggagattgaggccattgaacttccaatagatcccaagttgaacaaaagacggggttttgtttttattacatttaaagaggaagaccctgtgaagaaagttctggagaaaaaattccatactgtcagtggtagcaagtgtgaaatcaaggttgcccagcccaaagaggtgtaccagcaacagcagtatggctctgggggccgaggaaatcgcaatcgagggaaccgaggcagtggtggaggtcagagtcagagttggaatcagggctacggcaactactggaaccagggctacggctaccagcagggctacgggccgggctatggcggctacgactactcgccctatggctattacggctacggccccggctacgactacagtcagggtagtacaaattacgggaagagccagcgacgtggtggtcatcagaataactacaagccatactgagaggcagcaggagcggccgagtgacgacgcacacgctttgtttggacgcggagtgaacacaattatgtaccaaatttaacttggcaaacttttatggcctgtcccatgtgcatcttatttaaaatttcccccggaaatcactctcctgtttactattccagagctctagttgttgtaggcagcgtgtggcgtctcagaggtcagagcggcattagggggctgattttattaccaggttaccctgttctagattggagggtctgcttcctgctgccgctctgcagcctggacctgtggaccctggttgtaaagagtaaactgtatcttaggaaaccagtgtcacctttttcaccttttaattttatattatttgtgtcatacatttccagtaatggaagtgttaattttactgtactttttggtaccttttgggaatctaatgtattgtaaggtattttacacgtgtcctgattttgccacgacctggatattgaagctatccaagcttttgaaataaaaatccctgagagtctggtccactaactccagggactgtgggacagaggaacaaacaagaaagaactcgaggcctcgctgagtggcacgcttgctgagtgctgccacatcccgcaagctgagcaggtatcccaactctgttcctgcccggtagaccacccgaggtgtgagtgtggtcttgtcttccagattcgtaggacagaagctccaggaggaggacccgcccaacatggcatcggagagcgggaagctatggggtggccgatttgcaggctcggtcgaccccaccatggacaagttcaactcatctatcgcctatgaccggcatctgtggaatgtggacctgcagggaagcaaggcctacagcaggggcctggagaaggcagggcttcttcaccaaagctgagatgcagcagatactgcaaggcctggacaaggtggctgaagagtgggcccaaggcatcttcaaattgtaccctaatgatgaagacatccaccttcctcaaggtgctcattgaagccatggtagaccgggcagaggcggagtgtgaagtcctcttccctgggtacacacacttgcagagagctcagcccatccgctggagccactggatcctgagtcacgccgttgcgctgacacgagatttagagagactgaaggaggtgcagaagcggatcaatgtcctgccactgggcagtggggccattgcaggcaaccctctaggtgtggaccgggagttcctctgtgcagaactgaactttggagccattacgctcaacagtatggatgccaccagcgagagagacttcgtggctgagttcctgttttgggcttctctgtgcatgacccatctcagcaggatggcagaagacctgattctctacggtaccaaggaattcaactttgtgcagctctccgatgcctacagcaccggaagcagcttgatgccccagaagaaaaacccagacagcttggagctgatccggagcaaggcgggccgagtgtttgaagtgtctgataccatgacagctgtcctccaagtagccactggagtcatctctacactgcagattcatcgtgagaacatggcacaggcactcagccctgacatgctggctaccgaccttgcctactacctggtccgcaaagggatgccattccgccagcccacgaggcctcagggaaagctgtggtcgtggcagagatgaaaggggtggctctcaaccagctgtcacttcaggagatgcagaccgtcagtcccctgttctcgagtgacgtgaatctcgtgtgggactacagccacagcgtggagcagtacacagccttgggtggcacagcacagtccagtgttgagtggcagatcagccaggtgcgggccctgctgcagatgtagcagccctagattccacccagtcaaagctgcgccccaataaagtggagccctggagaggccgccat

SEQ ID NO: 1069 - DNA, 2157 bp, Rattus norvegicus
  Genbank Accession No. NM_031332
ctgagctgtcctaccacagcagccgccggaccctaggacagagcacgggccaccgccgcatccacctccagtccaactggatccagctccaaccaccagttttggttcatcttgcctggtgccatgaccttctccgagattctggaccgtgtcggaagcatgggccccttccagtacctgcatgtgaccttgctggccctcccagtcctcggaatagccaaccacaacttgctacagatcttcacagccaccacccctgtccaccactgtcgcccgccccccaacgcctctatagggccctgggtactccccttggacccaaatgggaagcctgagaagtgtctccgcttcgtacatctgccaaatgccagtcttcccaatgacacccagagggccaccgagccgtgcttggatggctggatctacaacagcaccagagacaccattgtgatagagtgggacttggtgtgcagctccaacaaactgaaggagatggcccagtcgatcttcatggcaggcatactggttggaggacctgtgattggagaactgtcagacaggtttggccgcaagcctatcctgacctggagttatctcatgctggcagccagcggctctggtgctgccttcagtcccagcctccctgtctatatgatcttccgattcctgtgtggctgcagcatctcgggcatttctctgagcaccgttatcttgaatgtggaatgggtacccacctcgatgcgggccatctcatcaacatctattgggtactgctacaccattggtcagttcattctgtccggcctggcctatgccattcctcagtggcgctggctacagttaacctcgtctgctcccttcttcatcttctccttgttgtcctggtgggtaccagagtccatacgctggctggttctatctggaaaatactcaaaggccctgaagacactccaacgggtggctaccttcaacggcaagaaggaggaagggaaaaagctcaccatagaggagctgaagttcaacttgcagaaggacatcacctcagccaaggtcaaatatggcttatctgacttgttccgggtgtccatccttcgtcgtgtgaccttctgtctctctctggcctggttttctactggttttgcctactacagtttggctatgggggtagaagaatttggagtcaacatctacatactccagattatctttggtggggttgacatcccagccaagttcatcacaatcctctccttaagttatctgggccggcgcatcactcagagcttcctcctgctcctagcaggaggggccattttggccctcatctttgtgccttcagaaatgcagctcttgagaacagcactggctgtgtttggaaagggatgcctatctggctccttcagctgcctcttcctctacacgagtgagctctaccctacagtcctcaggcaaacaggtatgggtatcagtaacgtgtgggctcgagtaggaagtatgatagccccactggtgaaaatcacgggtgaactgcagcccttcatccctaatgtcatctttgggaccacggccctactgggaggcagtgctgccttctttctgcttgagaccctcaatcggcccttaccggagactatcgaggacatacaaaactggcacaagcaagtccagaaaacaaagcaggagtcggaagcagaaaaggcatcccaaataatcccgctgaagactggtggataggaccctagctgagaacaacagaatcctctttcctggccacaagagactgatcccaagcagtacccttctggagttccttgggcaccttgggggttggggaaagccctaggtgggcccatgctcttggaacaaaaacttctgagagttcagtaaaggtgttctaccctcatcacctccaccatagcctacaacccagacccggcctgctcacagctctagccataggcttcccatactcctgcactcatcctccctgcagcccagccctgccattcttctgtcaacccttgccatattggccatttcctccattgtcccacctccattttccttgagatcccctagcagttctaatggtttcttcttaccttgcccaaactctctccttggtgggaaatttcaataaaccacaatgaagaactc

SEQ ID NO: 1070 - DNA, 2077 bp, Rattus norvegicus
  Genbank Accession No. NM_031341
ttttttttttttgtctgggtttcccttttactgctggaggaaggaggagctgtcagaccactgttcttggagggtgtgtgtgcctctttgtctcagagactgcgcctggccattgctgtgggaacctccttatatccagaggcagggaagggcgatgcaagggagctggtgaagacttgccttctctccgccatggtcgccagcaccaagtatgaagtggccgctcagaacgaggcagacgaggcagatggctctgctcagggggatggggcaggccctgcggctgagcaggtaaaactgaagaaggagatctcgctgcttaatggcgtgtgcctgatagtggggaacatgatcggctccgggatctttgtctcccccaagggcgtactcatgtacagtgcctcttttggcctctcgctggtcatctgggctgttgggggcattttctccgtctttggggccctgtgttatgccgaactgggtaccaccattaagaaatccggggccagctatgcgtacatcctggaggccttcgggggatttctcgccttcatccgcctctggacttctctgctcatcattgaacccaccagccaggccgtcattgccatcacctttgccaactacatggtgcagcccctcttcccgagctgtggcgctccctatgctgctggccgcctgctggccgctgcctgcatctgtctcttaaccttcattaactgtgcctatgtcaagtggggaaccctggtccaagatattttcacctacgctaaagtgttggcgctgattgcggtcatcattgcgggaattgttagacttggccagggagccacaactaactttgaggactcctttgagggctcatcgtttgcaatgggtgacattgccctggcactatactcagctttgttctcctactcgggctgggacacccttaactatgtcactgaagagatcaggaatcccgagaggaacttgcccctctccattggcatttccatgcccatcgtcaccatcatctacctcttgaccaatgtggcctattacagtgtgctagacataaaggacatcttggccagcgacgcggttgctgtgacctttgcagatcagatttttggaatattcaactggacaattccattagcagttgcattatcctgctttggtggcctcaatgcttccattgtggctgcttctaggcttttatttgtgggctcgagagaaggccacctcccggatgccatctgtatgattcatgttgaacggttcacaccagtgccttctctactcttcaatggtatcttggcactggtctacttgtgtgtggaggacatcttccagctcattaactactacagcttcagctactggttctttgtgggactttctattgtgggtcagctttacctacgctggaaggaacctgaccggccccgccctctcaagctcagcctgttcttccccatcgtcttctgcctctgtaccatcttcctggtggctgtcccgctttatagcgataccatcaactccctcatcggcatcggcatcgcgctctcgggcctgcccttctatttcctcatcatcagagtgcccgagcacaaacgacctctgtgccttcgcaggatcgtagcgtctaccacacggtacctccagatcatctgtatgtcagttgctgcagaaatggacttggaagatggagagttgcccaaacaaggtcccaagtctaaatagagcgtggaattctgagatgcgggcaaactcggcgtttctcatctcccattggccagaacctctggaggccccacccagagcccaggcttggcagcttcaactcggaacttgcttttgagggatgaagagtaatttatttgttttgctacgtgttgtttcggactttataagtggataatgcagactgtggcggaagcaggccatttctgaggcttggttctggcagcacccggggtgcctacccactcctctcttcctttaccagggccaacaatgctccaaatttgtctcctttagagggacacaaaactgtcacagatgcaaaacaataaaaagattatgttcc

SEQ ID NO: 1071 - DNA, 2485 bp, Rattus norvegicus
  Genbank Accession No. NM_031357
ccaaaatgggactccaagcccgcttcctaggactccttgctctcgtcatcgccggcaaatgcactcacagccccgagccggaccaacggtggatgctgcctccaggctgggtgtcactgggccgagtggatcccgaggaagagctgagtcttacttttgcgctgaaacagcagaacctggacagactctcggagctggtgcaggctgtgtcggatcccagctctcctcgatatggaaagtacctcaccctagaggatgtagctgagctggtccaaccatcaccactgaccctccgcactgtccaaaagtggctcttggcagctggagcccgggactgccattcagtgaccacccaggactttctgacttgctggctgagtgtccggcaggctgagctgctgcttcctggggctgagtttcatcgctatgtagggggacctgcaaagacccacattataaggtccccacatccctatcagctcccccaggccttggcccctcatgtggaccttgtggcggggctgcaccgtttcccccctttatcatctccgagacaacgtccagagccacaaggagtgggacctgttggcctgcacctgggagtgactccatctgtgcttcgtcagcgatataacctgacagcccgagatgtgggctctggcaccaccaacaatagccaggcctgtgcccagttcctggaacagtacttccataactcggatctgactgagttcatgcgcctgtttggtagcagttttgcacaccaggcctcagtagcaagagtggttggaaagcaggggcgaggccgagcgggcatcgaggccagtctagatgtggaatacctgatgagtgctggtgccaatatctccacttgggtctacagtagccctggccgccatgaggcacaggagcccttcttacaatggctcctgcttcttagcaatgagtcatccttgccgcatgtacatactgtgagttacggagacgatgaagactccctcagcagtgtctacatccagagagtcaacactgagttcatgaaggctgctgctcggggtctcaccctcctttttgcctcaggtgacactggagctgggtgttggtctgtctccggaagacacaagttccgtcctagcttccctgcttctagcccctatgtcactacagtaggaggaacctccttcaagaatcctttccttgtcacaaatgaagtagtcgactatatcagtggtggaggcttcagcaatgttttcccacagccttcataccaggaggaagcagtagcccagttcttgaagtccagctctcatctaccaccatctagttacttcaatgctagtggccgtgcttacccagatgttgccgcgctttctgatggctactgggtggtcagcaacatggtccccattccgtgggtatctggaacctcggcctctactccagtgtttgggggaattttatccttgataaatgagcacagactcctcaatggccgcccccctctaggctttctcaatcccaggctctatcagcagcatggggcaggactctttgatgtaacccatggctgccatgagtcctgtctgaatgaagaagtggagggtcagggtttctgctctggtcctggctgggatcctgtgacaggttggggaacacccaacttcccagccctactgaagactctactcaacccttgacccttccctgccctgacgagaaagcagaactgtttcctgtactacaagggaaggctcagtttctcgttattcctcaatggaagccctgatgaactcttaactgttgcctgctgcagatagcttctccctaaccctcaaatgctgtgagcaggactggactcccaaccctgtgagccatcaaactcaggtctccaaacttctacttcgagatccccaacaagatgctataaccagcattttgtctcaccccaaccccatctctccttcctctttccagcttgagatgtgaaagcagggcgagaagattcagtctgcattactgacaccagcagtcccacctaatgcttaccacctctgcactgaccgtatgctctttctcttccagctgcttcttcgttcactgaaatgagacctttgtgctaatcgtttagtctttcttcccctggcactgaagtgcaatggtctccctgacattctatccagttatacacttctcagtgttttatgggctttcttgtttaagaacaggttggtgatgggttggggatttagctcagtggtagagcgcttgcctaggaagcgcaaggccctgggttcggtccccagctccgaaaaaaagaaccaaaaaaaaaaaaagaacaggttggtgacaatctatataactattctaaggaaagttcaagtttgaaaattttaaatgttttaaatgttcttattggcaaagctcctcaacaaaataaataggtgttacaaattttgcttcaaaaaaaaaaaaaaaaaaaaaaaaa

SEQ ID NO: 1072 - DNA, 1178 bp, Rattus norvegicus
  Genbank Accession No. NM_031509
acattaaccaactgtttagcaactcaggcatgactttgcatttttcttctaatctttcatagaaatttctggccactggacactgtgggagcagcttttaccttattggactatctccccttaagtgggaagggcttagtcaaatgcagtaaagagctataaaacaccgagaactcttgatgtgttgtgaaacttagagggagcagctttttaacaagagaactcaagcaattgctgccatgccggggaagccagtccttcactacttcgatggcagggggagaatggagcccatccggtggctcctggctgcagctggagtagagtttgaagaacaatttctgaaaactcgggatgacctggccaggctaaggaatgatgggagtttgatgttccagcaagtgcccatggtggagattgatgggatgaagctggtgcagaccagagccattctcaactacattgccaccaaatacaacctctatgggaaggacatgaaggagagagccctcatcgacatgtatgcagaaggagtggcggatctggatgaaatagttctccattacccttacattccccctggggagaaagaggcaagtcttgccaaaatcaaggacaaagcaaggaaccgttactttcctgcctttgaaaaggtgttgaagagccatggacaagattatctcgttggcaataggctgagcagggctgatgtttacctagttcaagttctctaccatgtggaagagctggaccccagcgctttggccaacttccctctgctgaaggccctgagaaccagagtcagcaacctccccacagtgaagaagtttcttcagcctggcagccagaggaagccattagaggatgagaaatgtgtagaatctgcagttaagatcttcagttaattcaggcatctatggatacactgtacccacaaagccagccttcgaaagctttgcaacaatcgcatattttgactaaatgttgaccctacttattgggaggccaacacgttttctaatgcttctgtgttaattcatatagacatgactgatgaggaattgctgggatgctatttggttgtagttaaaatttgaaatcatgatcacttcctcagatattactttgaatctcaataaaaacttcgcaagctttttaaaaaaaaaaaaaaaaaaaaa

SEQ ID NO: 1073 - DNA, 873 bp, Rattus norvegicus
  Genbank Accession No. NM_031523
agctccaagctcagcacctgctgctcctgcatgcctgttaccatgtggttcctgatcctgttcctcgccctgtccctgggacggaatgatgctgcacctcccgtccagtctcgggttgttggaggatataactgtgagatgaattcccaaccctggcaagtggctgtgtactacttcggcgaatacctatgtgggggtgtcctgatagaccccagctgggtgatcacagctgctcactgcgcaaccgacaattaccaggtttggctgggccgaaacaacctatatgaagatgaaccctttgctcagcaccggcttgtcagccaaagcttccctcaccccggtttcaaccaggacctcatatggaaccacacccgacaacctggggacgactacagcaatgatttgatgctgctccacctcagccagcctgcggacatcacagatggtgtgaaggtcatcgatctgcccattgaggagcccaaggtggggagcacctgccttgcctcgggctggggcagcatcacacctgacggattggaattaagtgatgatctccagtgtgtgaacatcgatcttctgtctaatgagaagtgcgtcgaggcacacaaagaagaggtgacagatctcatgctgtgtgcaggagagatggatgggggcaaagacacttgcaagggtgactcaggaggccccctcatctgtaatggtgtgctccaaggcatcacgtcctggggctttaacccatgcggtgaacccaagaagccaggcatctacaccaaacttattaagttcaccccctggataaaagaagttatgaaggaaaacccctgagtgtcacacagtcccctggtctcaataaaacccaccatgcagcac

SEQ ID NO: 1074 - DNA, 780 bp, Rattus norvegicus
  Genbank Accession No. NM_031530
gcagagacacagacagaggccagcccagaaaccagccaactctcactgaagccagatctctcttcctccaccactatgcaggtctctgtcacgcttctgggcctgttgttcacagttgctgcctgtagcatccacgtgctgtctcagccagatgcagttaatgccccactcacctgctgctactcattcactggcaagatgatcccaatgagtcggctggagaactacaagagaatcaccagcagcaggtgtcccaaagaagctgtagtatttgtcaccaagctcaagagagagatctgtgctgaccccaataaggaatgggtccagaagtacattagaaaactggaccagaaccaagtgagatcagaaactacagtcttctataaaattgcatcaaccctaaggacttcagcacctttgaatgtgaacttgacccataaatctgaagctaatgcatccactctcttttccacaaccacctcaagcacttctgtagaagtgaccagtatgacagagaactagtgtgatttggaatgtgatgccttaagtaatgttaaacttatttaacttattgatattacactattcccttccatgaatactagaaatccttaaatgcaagatgtagatccatttttttatttctctgtgaatcctggttcaacactttcaatgtatgagagatgaatgggtaaactttgtgtttgagagtccaaggtattgtttaaaatattattatggatattcctaattattaaaagaaatatattatttttgtac

SEQ ID NO: 1075 - DNA, 1593 bp, Rattus norvegicus
  Genbank Accession No. NM_031533
atgcccagaaagtggatttctgctctgttcctgctacagataagttactgtttcaaatctgggcactgtgggaaggtgttggtgtggccgatggactttagtcactggatgaatataaaaataatccttgatgaacttgtacagaggggccatgaggtcactgttctgaaaccttcggcttacttttttcttgatccgaaaaaatcgtctgaccttaagtttgaaattttttctacatctatcagtaaagatgagctgcaaaatcatttcataaaacttttggatgtgtggacttatgagttgccaagagatacatgtttgtcatattctcctatccttcaaaatctagtttatgaattttcttatttttatctaagtatttgtaaagacgctgtttcaaacaagcagctcatgacaaaactacaggaatccaagtttgatgttcttttcgcagatcctgtggcttcctgtggggatctgatagctgaactgctccacattccttttctgtacagtcttagcttctctccaggccacaaacttgaaaagtccattggaaaatttatactccctccatcttatgtgcctgtaattttgtcgggactggctggcaaaatgacattcatagacagggtaaaaaatatgatatgtatgctttatttcgacttttggttcgagagacttagacacaaggaatgggacacgttttacagtgagattttgggaaggcccaccaccgtagatgagacaatgagcaaagtagaaatatggcttattagatcctattgggatttgaaatttccccacccaacattaccaaatgttgactatattggaggactccattgcaaacctgctaaacccttgcctaaggatatggaagaatttgtccagagctctggagagcacggtgtggtggtgttttctctggggtcaatggtcagcaacatgacagaagaaaaggccaacgcaattgcatgggcccttgcccagattccacaaaaggttctttggaaatttgatggcaaaaccccagcaacattaggacccaataccagagtctacaagtggctcccgcagaatgacctcctgggtcacccaaaaaccaaagcctttgtaactcatggtggagccaatggcctctatgaggcaatctatcatggaatccctatgattggcattcctctgtttggagatcaacctgataatattgcccacatggtggccaaaggagcagctgtttcattgaatatcaggacaatgtcaaagttagattttctcagtgcactggaggaagtcatagacaatccgttctataaaaaaaatgttatgttgttgtcaaccattcaccatgaccagcctatgaagcccctggacagagctgtcttctggattgagtttatcatgcgccacaaaggggccaagcacctgagaccacttggacataaccttccctggtaccagtaccactctctggatgtgattggattcctgctcacctgttttgcagtcattgcagctcttactgtaaaatgtctcttgttcatgtaccgattctttgtaaagaaggaaaagaaaatgaagaatgagtag

SEQ ID NO: 1076 - DNA, 1624 bp, Rattus norvegicus
  Genbank Accession No. NM_031543
gccctagcgcacatggcggttcttggcatcaccattgccttgctggtgtgggtggccaccctcctcgtcatatccatctggaagaagatctataacagttggaacctgcccccaggacctttccctcttcccatccttgggaacatttttcagctggatttgaaggatatccccaagtctttcaccaagttggcaaagcgcttcgggccagtgttcacactgcaccttggctcaaggcgcatcgtggtcctgcatggctacaaggctgtcaaggaggtgctactgaaccacaagaatgagttttctggacggggggacattcctgtgttccaggagtacaagaacaaggggattattttcaataatgggcccacatggaaggatgtgcggaggttttccctaagcattctccgagactggggaatggggaaacagggtaatgaggcccgcatccaaagggaggcgcaattcctggtggaggagctcaaaaagaccaaaggccagccttttgaccccacatttctgattggctgcgcaccctgcaatgtcattgcggatatcctcttcaacaaacgtttcgactacaatgacaagaagtgtctgaggctcatgagtttgttcaatgaaaacttctacctgctgagcaccccctggatccagctttacaataactttgcggattatctacgatacctacctggaagccatagaaaaatcatgaaaaatgtgtctgaaataaaacagtacacacttgaaaaagccaaggaacaccttcagtcactggacatcaactgcgcccgggatgtgactgactgtctcctcatagagatggagaaggaaaaacacagccaagaacccatgtacacaatggaaaatgtttctgtgactttggccgacctgttctttgcaggaactgagaccaccagcacaactctgagatatgggctcctgatcctcatgaaatacccagaaattgaagagaaacttcatgaagaaattgacagggttattgggccaagccgcgtccctgctgtcagagacagactggatatgccctacatggatgctgtggtgcatgagatccagagattcatcaatcttgtcccttccaacctaccccatgaagcaaccagagatactgtgttccaaggatatgtcatccccaagggtacagttgtgattccaactctggactccctcttatatgacagccatgagtttccagatccagagaagtttaaacctgagcatttcctgaatgaaaatgggaagttcaagtacagtgactatttcaaggcattttctgcaggaaagcgtgtgtgtgttggagaaggcctggcccgcatggaattgtttctgctcctgtctgctattctgcagcattttaacctgaagtctctggttgaccctaaggatatcgacctcagtcctgtcacagttggctttggcagtatcccaccccaatttaaactctgtgtcattccccgttcatgagacctgaaaacttcctgatatcccttccattgttatcccttaaactatgactgtttttaaaaaacccaagcatatagagttcctatcataaaatgaaaccgaaaaaataaataaaaccttgatgaattgt

SEQ ID NO: 1077 - DNA, 1605 bp, Rattus norvegicus
  Genbank Accession No. NM_031546
agtcattacaacccaggtgtggatgctggagtgtttcctttgtcttctattttaaagatatcttgaaaaaaacctgtcactgtccttttcctgcgaccatgtcttccatcaagattgaatgtgttttaagggagaactacaggtgtggggagtcccctgtgtgggaggaggcatcaaagtgtctgctgtttgtagacatcccttcaaagactgtctgccgatgggattcgatcagcaatcgagtgcagcgagttggtgtagatgccccagtcagttcagtggcacttcgacagtcaggaggctatgttgccaccattggaaccaagttctgtgctttgaactgggaagatcaatcagtatttatcctagccatggtggatgaagataagaaaaacaatcgattcaatgatgggaaggtggatcctgctgggagatactttgctggtaccatggctgaggaaacggccccagctgttctggagcggcaccaagggtccttgtactccctttttcctgatcacagtgtgaagaaatactttgaccaagtggatatctccaatggtttggattggtccctggaccataaaatcttctactacattgacagcctgtcctacactgtggatgcctttgactatgacctgccaacaggacagatttccaaccgcagaactgtttacaagatggaaaaagatgaacaaatcccagatggaatgtgcattgatgttgaggggaagctttgggtggcctgttacaatggaggaagagtaattcgcctagatcctgagacagggaaaagactgcaaactgtgaagttgcctgttgataaaacaacttcatgctgctttggagggaaggattactctgaaatgtacgtgacatgtgccagggatgggatgagcgccgaaggtcttttgaggcagcctgatgctggtaacattttcaagataacaggtcttggggtcaaaggaattgctccatattcctatgcagggtaaactgcagctcttccttgctgtcagaagaaaaagctttgaagacaactggagaattaagggagagaaatcaatgaactttcaatcttgtttttttaatgaggcagtgatattatagcatggttaaactgctttaatttacacttttgattgggtgctggggaataaacctaaagcatggcatattaatgaagaacatatggtaaccatgaactccatctctggattcctttatttacaattttttaaaggttgaatattcgcaccagagaatgacaagtggttttgacaacatactctaggccttctattaaaaacaatctgtagaaaaggagctcaactatcaatcatcctgatcaattgctctggggcttgaaatgagacaatttccattctttttttttgcattccatacttgctgtacataaggcttccaaaaaatcaacgcatagaaacttagttgtaatttataatgattgtgtgacttttcatgtgttattttacaaactaaaatattaccagatgttattcaaacactggagcacaaactgtggttttaactgccacctagtggctatacaaataaatgcatcacattacaaagaaaaaa

SEQ ID NO: 1078 - DNA, 4377 bp, Rattus norvegicus
  Genbank Accession No. NM_031559
agtcggtcgactccgagctcagtgaggacctaaagcagaggactgtggtgcggaggacagtgcttgctccggggagtgcagagcaataggtccccactcaagatggcagaggctcaccaagctgtggccttccagttcaccgtcacccccgatggcattgacctccgcctgagccacgaagccctcaaacagatctgcctgtcggggctgcactcctggaagaagaagttcatccggttcaagaatggcatcatcactggtgtgttccccgcgaatccgtccagctggcttatcgtggtggtgggtgtgatttcatccatgcatgccaaagtggacccctccctgggcatgatcgcaaagatcagtcggaccctagacaccactggccgcatgtcaagccagacgaagaacattgtgagcggcgtcctctttggtacagggctctgggtggcagtcatcatgaccatgcgctactcgctgaaggtgctgctctcctaccacggctggatgtttgcagaacacggcaaaatgagccgcagcaccaagatctggatggctatggtcaaggtcctctcaggtcggaagcccatgttgtacagcttccagacgtctctgccacgcctgcctgtcccagctgtcaaagatactgtgagcaggtacctggaatctgtaaggccactgatgaaggaagaagacttccagcgcatgacagcactggcccaggattttgctgtcaacctcggacccaaattgcagtggtatttgaagctaaaatcctggtgggccacaaattacgtgagtgactggtgggaagaatatatctacctgcggggccgagggccgctcatggtcaacagcaactactacgccatggagatgctgtacatcaccccaacccatatccaggcagcgagagctggcaacaccatccacgccatactgctgtatcgtcgcacattagaccgtgaggaactcaaacccattcgtcttctgggatccaccattccactctgctcagcccagtgggagcgactcttcaatacttcccggatccctggggaggagacagacaccatccaacatatcaaggacagcaggcacattgttgtgtaccacagagggcggtacttcaaggtctggctctaccacgatgggaggctgctgaggccccgagagctggagcagcagatgcagcagatcctggatgatccctcagagccacagcctggggaggccaagctggccgccctcactgctgcagacagagtgccctgggcaaagtgtcggcagacctattttgcacgagggaaaaataagcagtccctggatgcggtggaaaaggcagcgttcttcgtgacgttggacgaatcggagcagggatacagagaggaggatcctgaggcatccatcgacagctacgccaaatccctgctgcatggaagatgctttgacaggtggtttgacaagtccatcacctttgttgtcttcaaaaacagcaagataggcataaatgcagagcactcctgggcggacgcgcccatcgtgggccatttgtgggagtatgtcatggccaccgacgtcttccagctgggttactcagaggatggacactgtaaaggagacaccaaccccaacatccctaagcccacaaggctacaatgggacattccaggagagtgccaggaggtcatagatgcatccctgagcagcgccagtcttttggcaaatgatgtggacctgcattccttcccatttgactctttcggcaaaggcttgatcaagaagtgccggacgagtcccgatgccttcatccagctggcgctgcagctcgcacattacaaggacatgggcaagttctgcctcacatatgaggcctccatgacccggctcttccgagaagggaggacagagactgtacgctcctgcactatggagtcctgcaactttgtgcaggccatgatggaccccaagtcaacggcagagcagaggctcaagctgttcaagatagcttgtgagaagcaccagcacctgtaccgcctcgccatgacgggcgccggcatcgaccgccatctcttctgcctctatgtggtgtccaagtatcttgcagtcgactcacctttcctgaaggaggtattgtctgagccatggaggttgtctacgagccagactcctcagcagcaggtggagctctttgactttgagaaaaaccctgactatgtgtcctgtggagggggctttgggccggttgccgatgacggctatggtgtctcctacattatagtgggagagaatttcatccacttccatatttcttccaagttctctagccctgagacagactcacaccgctttgggaagcacttgagacaagccatgatggacattatcaccttgtttggcctcaccatcaattctaaaaagtaaacccctgagccacacggaaggaaaacggaccctcgtgatacaaaccaaatgaatagatgttgctcctgaccataggacaggcagaaaattgctcttataaaactcagttttccttccagaaggtttaccgtcagtctccctagaacaacagtaggcttcacgtgtgaattgtgaccctactacatccagagatgccttggctccaggaatattgggcacagtcccctgatgtcttttgaatcggctcctactggataaagggatttaaatgctggtgaattcctggattctgggggttgtttcttcacatgtgttggaggtgacagacttcctcagtggtgaccctgtgaatacttgggcgtctgactccacccaggcagtgtgagcatcaccttgtggaaagagaaagtgtcttcagagccagcagaggcaacagctgtagctaacacatctgtaacacactaatggaatggttaggcctggggattaaggttctgctatgagtgacagccactgtccctttggaagttcacatttccaggaagcagagtaccacctccccagtgccaccttcctcacacatcttcaaaacccagtgccttaaagaaggggcccattggcaagcgggaccatagagaagacttagcatctgtgaagcctttgggtggatatgtgaggatgctgcttccccttactggttcctgcataaagatgtccctaagtaagcacttcccccacccctagaaaatgaggtccttggtgaaggcagggatgctggagtctcattgcctgccagttccattaagccacaaaatagcagacatgtgtccacagagggaggggcttggtagtcaaaggctgcatagctggacaacagcgggagagtgtggcttgctgtatttgacagctgttggcaagaggagtgagaccctggtcaccaagtcagacatactgacacaggcagccaaagctcacggagccaggagatatagatagatactggcttgtattctggcagatacacccctgggcttatcttctaatcccacccagtcagattccaaccagagtcaaattccatagaaggctaggtcattttggcgacagactcagggatctcaagtaatgggtgcttttacccacatgccatccctcagtgggagtgcctttcttgaaagcatccaatgggctaaagcagctctaccaagtctgtttggtatttaatgtaaacattagcattaatggagtggtctctcctacctgtcaccatcctgtcctgacaagcttagctctccgaggtttacatcatgtatttattttccagtgcccctttggccttgtttgattcctgcccctgtgccagaagtggcccagaagtgaggggtggggtgaccagcagtgcagagaggtgctggctgaacagttcatgtgtgtcttatgggtatacatgtataaattttgtaatgtaaaaaaaaaaatcatacctaaaagggccaaagttttttttttttttactaaaaccaagaaaacaaaagacaacataaagacataagcagaaacaaactgttgtaagtcagagcggcctgactctcgctgctgtgaccactcaccaacctgtgttactcagagtagcccggctagtgcccgagtgggacattcctctctcaggtttccagtgtccttgctgctcctgagcagttaccaatgcaatttcgcattccttacaaggcagaagagtgggctctcactgtatgtgttcaaaggaggaggtaagactattgtgtatttaatttaatgtggaacaaaatatagtcttaccgcagccaaggttcaaatttggtgttctaatctgtccattgcatgtaaataccatatctgtttggatataaatcttagaagtgcatgtgtgagcgaatgtagctggccattaataaaacattaatactgtctact

SEQ ID NO: 1079 - DNA, 2638 bp, Rattus norvegicus
  Genbank Accession No. NM_031579
cacaatcttcaatgagtagacatattcctcagttctgtggtgttctcggtcacacatttatggagtttctgaagggcagtggagactactgccaggcacagcacgacctctatgcagacaagtgaactgtagaaattcattactactccaccaagaagcccccataagagtggatagcctggacacagtcgtgttgaattgaaatctgcagagcattttccaagagctcagacctggatggggtaaacctcagtgcacttcctctgtatcgcctcagtattcctggattgaagagtcactgcttcttgtgaggaggttcatttcattgcccgtttctcccgactcatactcaaagcactgagaatttcaagtggagtatattgaatattgaagtagacttcaggttgttttttggttttgttttggttttttgttttgttttgttttgttttgttttggttttcagtttttgtttggaatcatttctgtattcaattttttaattctttcataaccctattgggtgtttttttaaactaaattaacatggctcgaatgaaccgccctgctcctgtggaagtcacatacaagaacatgagatttcttattacacacaatccaaccaatgcgaccttaaacaaatttatagaggaacttaagaagtatggagttaccacaatagtaagagtatgcgaagcaacttacgacactactcttgtggagaaagaaggcattcatgttcttgactggccttttgatgatggtgcaccaccatccaaccagattgttgatgactggttaagtcttgtgaagattaagtttcgtgaagaacctggttgctgtattgctgtccattgtgtcgcaggccttggcagagctccggtgcttgttgccctagcattaattgaaggtggaatgaaatatgaagatgcagtacaattcataagacaaaagcggcgcggagcttttaacagcaagcaacttctgtacctggagaagtaccgtcctaaaatgcggctccgcttcaaggattccaacggtcatagaaacaactgttgtattcaataaaactggggtgcctgatgccattgccttggaagaggaacttcagatgggacctgatttgttatttacccaatgtgtccacttacctgtggaagctccaggggaatattgaaaaagttttaccaggccacaagcttgacagaattgcaacctctataattgggctatgatcaacacgtttggacacttagcaaaagatttttgctggtcagcatttaaaatgtgcttattatttgtaccaattgacctttcctaaaataaggtattgagtaatgtcattaaatgtactcctgtgccagaatattattagtctataaggaatttagaaggattaggtgccaaaatacccagcacaatacttgtatatttttagcatcatacagaaccaaaattccaagaactaagaactctccagaccttccatggtgtattccttcagtcatttcaaacaccgcagggcttctcttgttatctgcctgctcactctatgtttacatctcccacacttacaccagaacacatcaggtttgcttagctatcttttaagtcttgcaatgattatttaatgtctctgtcttattttgtgctgttttgggaaacctccatttgaaaatcaactttgttacagaagcacatatcttcaataatgtctccagacaaaaagccttatagttaatttaatgtttgcactcgggtgcaacctgacagggagggcctgaacaagaaaggagaggaggctattaaatatttttagtaatatgttgcctttgtcttgtgcagaacatgtagagtatgctctttaatttagtaaatatttttaagacgtagagatacattgttgtagctaaccacttaatcaaaatttctgaaattcttgtgttttccatacctatctgaggttttccaacttgtttgaattatggttttccccttctcttcccaatctcttgcaaaaaagtaaaagtgggatctgctagtgaactgagcagaaatattttatacgccttttgagctatgtaacttaataattggatacttgatcatttgttttattatgtaatcgataaaatggtgatgtgtattaatgttagttcaaccatatatttatactgtctgggaatgtgtggttatagttctgtgggagaaatagtttgtcagtgttcaccagcttgtaaaaacttagtgcgagagcttcaacatctaaataaatgatgaaacgcattcgtcactgaggtcactttgcttaaaattaacttaatttgtagaaaacagtggattcaattattatcatttcagtttatggacaaatttgttagggttaccaagtgcgtttaaaaattgctctttaaaggtctagataattgtgaatcaattgaatgttgggtaccaagggaaaacggtttgtaatagttgatgaccttgatttttaattcaattccaccagtcacttgtagctttatgcagtttccaatccacttttctcatttttaagtttattacttacctgtatatattttgaaattaatttgaacctgcgtatttggcacatgatggcttataaattttaactttc

SEQ ID NO: 1080 - DNA, 2152 bp, Rattus norvegicus
  Genbank Accession No. NM_031584
atgcacgcgtccgcctgagctgagcgcgctgccttcagcagcatttggagccctgtgggtgaagcctcaggaacagctgcctccagggaccatgtcgaccgtggatgatattctagaacatataggggaattccacctttttcagaaacaaacatttttcctcttagctctgctgtctggtgccttcacccccatctacgtgggcatcgttttcctaggatttacccctgaccaccactgctggagtcctggggcagccaagctgagccagcggtgtggctggagccaggcagaggagctgaactacaccgtgccgggtctgggaccttcggacgaggcctccttcctcagccagtgcatgaggtatgaagtggactggaaccagagcacccttgactgtgtggacccactgtccagcctggctgcggacaggaaccagttgccattgggcccctgcgagcatggctgggtatacaacactcccggctcctccattgtcactgagtttaacctggtgtgtgctcactcctggatgctggacctgtttcagtcagtagtgaacgtggggtttttcatcggtgctatgatgattggctacctagcggacaggtttggccggaagttctgcctcttggtcaccatcctcatcaatgctatctctggggctctcatggcgatttctcccaactatgcctggatgttggtgtttcgctttctccagggactggtcagcaaagcaggctggttaattggctacatcctgattacagaatttgttgggctgggctatcgcagaatggtggggatttgctatcaaatcgccttcaccgttggcctcctgatcctggctggagtggcctatgtgattcccaactggagatggctacaatttgctgtgactctgcccaacttctgcttcctgctctatttctggtgcataccggaatctccaagatggctgatctcccagaacaaaatcgtaaaagccatgaagataattaaacatattgctaagaaaaatggaaagtcggtgccggtctctcttcagaacctgacaccagatgaggacgctggcaagaaattgaaaccttcaatcctggacttggtcagaacccctcagataaggaaacacacgttgatcttgatgtacaattggttcacgagctctgttctctaccagggcctcatcatgcacatgggccttgcaggggacaacatctacctggatttcttctactccgccctggtggagtttccagccgccttcatcatcatcctcaccatcgaccgggttggtcgccgctatccctgggctgtgtcaaatatggtggcaggagcagcctgtctagcctctgtttttatccctgatgatctacagtggctgaaaattaccattgcatgcttgggtagaatgggcatcaccatggcctatgaaatggtctgcctggtcaatgctgagctgtaccccacatacatcaggaatcttggtgtccttgtctgctcctccatgtgtgacattggcggcatcatcacgcctttcctcgtctaccgtctcacggacatctggatggagttcccactggttgtatttgctgtggttggccttgtcgctggggcacttgtgctgttgctacctgagaccaaagggaaggctctgcctgagaccatcgaggatgccgagaatatgcagaggccaagaaaaaaagaaagaaaagagaatttacctccaagtcaagcaagcagaccgtccgctaagctaaaaagaaagggcatcattgctgctggagctgactttgctctctctgaggccagagatggagcttctctctcccctccccccaaacccacacaaaccaacctcacttacccctgaactccatcagcaagagctgtagcttgcacggtctgttgcactgatgtgtcaagctcttcctcccagccaggattttccgcctcactctgctctcagcactcccaggaaatgaccattgctttactggattcgttatggttgttttttcatctttacattctttatttagtttccttctccaccacaacatcaaaccaaaatacccaagggagctgtgggccaggacaaccaactattaaagaagtaagaaatctgaaaaaacaataaacgtgggagaag

SEQ ID NO: 1081 - DNA, 852 bp, Rattus norvegicus
  Genbank Accession No. NM_031587
aattcggcacgagcgcgatggcacctgccgcgtcaaggctgagggtggaatccgagctccggtcgcttcccaagcgagcgctcgcccaatacttgctgtttctaaagttctatccggtggtcaccaaagctgtcagcagtggcattttgtcagcccttggaaaccttctggcccagatgattgagaagaagcagaaaaaagactctcgaagtctagaagtcagtgggcttctcagatatttagtttatgggttgtttgtcacaggtcccctgagtcactacctctacctcttcatggagtactgggtccctcctgaggttccctgggccagagtcaagaggctcctgctggatcgcctgttctttgccccaacctttctgctgctgttcttcttcgtcatgaacttgctggagggaaaaaacatcagtgtctttgttgccaagatgaggagtggcttctggcctgctctgcaaatgaactggaggatgtggacacccttacagttcatcaacatcaactatgtgcccttgcagttccgggtgctctttgccaacatggcagctctgttctggtatgcctacctggcctctctggggaagtgatgtctgatacaccgtggatgaggtgtggggagatccaaccaccagcaggagagagcagaatccatcattaaggacacctcatgactaaattatgtgattcaagatgccttaaaattacagagggaggaacgtgtcagtgtcggaatcatgtgcttcaaagagacagcactagtctcggtggagttaatcttagttgtcactgcaaacaggtaaaggtcaataaacagtgatgcagcctcgtgccgaattc

SEQ ID NO: 1082 - DNA, 3272 bp, Rattus norvegicus
  Genbank Accession No. NM_031588
gcggccgcagctgccgggagatgcgagcgcagaccggattgtgatcacctttccctcttcgggctgtaagagagcgagacaagccaccgaagcgaggccactccagagccggcagcggagggacccgggacactagagcagctccgagccactccagactgagcggacgctccaggtgatcgagtccacgctgcttcctgcaggcgacaggcgacgcctcccgagcagcccggccactggctcttcccctcctgggacaaacttttctgcaagcccttggaccaaacttgtcgcgcgtcaccgtcacccaaccgggtccgcgtagagcgctcatcttcggcgagatgtctgagcgcaaagaaggcagaggcaaggggaagggcaagaagaaggaccggggatcccgcgggaagcccgggcccgccgagggcgacccgagcccagcactgcctcccagattgaaagaaatgaagagccaggagtcagctgcaggctccaagctagtgctccggtgcgaaaccagctccgagtactcctcactcagattcaaatggttcaagaatgggaacgagctgaaccgcaaaaataaaccagaaaacatcaagatacagaagaagccagggaagtcagagcttcgaattaacaaagcatccctggctgactctggagagtatatgtgcaaagtgatcagcaagttaggaaatgacagtgcctctgccaacatcaccattgttgagtcaaacgagttcatcactggcatgccagcctcgactgagacagcctatgtgtcctcagagtctcccattagaatctcagtttcaacagaaggcgcaaacacttcttcatccacatcaacatccacgactgggaccagccatctcataaagtgtgcggagaaggagaaaactttctgtgtgaatgggggcgagtgcttcacggtgaaggacctgtcaaacccgtcaagatacttgtgcaagtgcccaaatgagtttactggtgatcgttgccaaaactacgtaatggccagcttctacaaagcggaggaactctaccagaagagggtgctgacaattactggcatctgtatcgccctgctggtggtcggcatcatgtgtgtggtggcctactgcaaaaccaagaagcagcggcagaagcttcatgatcggcttcggcagagtcttcggtcagaacggagcaacctggtgaacatagcgaatgggcctcaccacccaaacccaccgccagagaacgtgcagctggtgaatcaatacgtatctaaaaacgtcatctccagtgagcatattgttgagagagaagtggagacttccttttccaccagtcattacacttccacagcccatcactccacgactgtcacccagactcctagtcacagctggagtaatgggcacacggagagcgtcatttcagaaagcaactccgtaatcatgatgtcttcggtagagaacagcaggcacagcagtcccgccgggggcccacgaggacgtcttcatggcctgggaggccctcgtgataacagcttcctcaggcatgccagagaaacccctgactcctacagagactctcctcatagcgaaaggtatgtatcagccatgaccaccccggctcgtatgtcacctgtagatttccacacgccaagctcccctaaatcgcccccttcggaaatgtctccacccgtgtccagcatgacggtgtccatgccctctgtggcagtcagcccctttgtggaagaagagaggcctctgctgcttgtgacgccaccaaggctacgggagaagaaatatgatcatcacccccagcaactcaactcctttcatcacaaccctgcacatcagagtaccagcctcccccctagcccactgaggatagtggaggatgaggagtacgagacgacccaggagtatgagtcagttcaagagcccgttaagaaagtcaccaatagccggcgggccaaaagaaccaagcccaatggccacattgccaataggttggaaatggacagcaacacaagttctgtgagcagtaactcagaaagtgagacagaagacgaaagagtaggtgaagacacaccattcctgggcatacagaaccccctggcagccagccttgaggtggcccctgccttccgtctggctgagagcaggactaacccagcaggccgcttctccacacaggaggaattacaggccaggctgtctagtgtaatcgctaaccaagaccctattgctgtataaaacctaaataaacacatagattcacctgtaaaactttattttatataataaagtatttcaccttaaattaaacaatttattttattttagcagttctgcaaatagaaaacaggaagaaaaaaaaacttttataaattaaatatatgtatgtaaaaatgtgttatgtgccatatgtagcaatttttttacagtatttcaaaaacgagaaagatatcaatggtgcctttatgttctgttatgtcgagagcaagttttataaagttatggtgatttctttttcacagtatttcagcaaaacctcccatatattcagtttctgctggctttttgtgcattgcattatgatgttgactggatgtatggtttgcaaggctagcagctcgctcgtgttctctctctctctctctctctctctctctctgtctctctctctgtctctctctctctctctctctctctctctctctctctctctctctctctctctctgtctctctctctgcttcccgtagctcccaaccagtactgtcttggactggcacatccatccaaatacctttctactttgtatgaagttttctttgctttcccaatatgaaatgagttctctctactctgtcagccaaaggtttgcttcactggactctgagataatagtagacccagcagcatgctactattacgtatagcaggaaactgcaccaagtaatgtccaataataggaagaaagtaatactgtgatttaaaaaaaaaaacaaactatattattaatcagaagacagcttgctcttggtaaaaggagctaccattgactctaattttgactttttagttattgttcttgacaaagagtaacagcttcaagtacagcctagaaaaaaaaatgggttctggcctgctatcaggataaatctatcgacgtagatagattcaactcagtttcactttctgtcttgggggaaatgatccagccactcatatgacgaccaaccaaccacaggtgcctctgctccctgt

SEQ ID NO: 1083 - DNA, 1930 bp, Rattus norvegicus
  Genbank Accession No. NM_031589
aaaaacacagctcagcagatccgggcactggagagggagctgcaagcaggagcagtcaagagtgtggtcagaagcaccgtgagtggaccagcagggccggctttttctaccatggcggcccaaggctatggctattaccgcactgtcatattcacagccatgttcggaggctacagcctttactacttcaaccgcaaaaccttctcttttgtcatgccctccttggtggatgagatcgctctggacaaggacgatttggggctcatcacgagcagccagtcggcagcctacgccatcagcaagtttgtgagcggggtgctgtctgatcagatgagtgcccgttggctcttctcctctgggctgctcctggttggtctggtcaacgtagtcttctcgtggagctctacagtaccggcttttgctgctctctggtttcttaatggtctggcacaggggctaggctggcccccctgtgggaagatcctgaggaagtggtttgagccatcccagtttggtacttggtgggctgtgttgtcaaccagcatgaacctggctggaagcctgggacctatcttggcgacaatccttgctcagagctacagctggcgcagcaccctggccctgtctgggtcactgtgtgtggttgtctccttcttctgtctcctgctcatccacaacgaacctgctgatgttggactccgaaatctggaccctcgcccctccaagggcaaaaagggctcgtcaaaggaggagagcaccctacaggacctgctgctgtccccctatctctgggtgctctccactggctacctcgtggtctttggggtaaagacttgctgtacagactggggccagttcttccttatccaggagagagggcagtcggcccttgtgggtagttcctacatcagtgccctagaggttggaggccttgtaggcagcattgcagctggctatctgtcagacagggctatggcaaaggcagggctgtctgtgtatgggaaccctcgccacagcctgttgctgctcatgatggctggcatggcagcatccatgttcctcttccgggtaacagtgaccagcgactctcccaagatctggatcctggtattgggagctgtatttggtttctcttcttatggtcccattgccttgtttggagtcatagctaatgagagtgcacctcccaacttgtgtggtacctctcatgctattgtggggctcatggccaatgtgggtggatttctggctgggttacccttcagtaccatcgccaagcactatagctggagcacagccttctgggtggcagaagtgatctgtatagccagcacagttgtcttcttcttgcttcgaaatatccgcaccaagatgggccgagtatccaagaaggcagagtgaaaagagcactcactatagagcatccccaactgcaacctcattggcaggacacagaaaggaagagaggctgctctggctagaacagagcctttacatatctgtgtctacactgtctctctggacctccgtggtgctgcaagttaccagtggctaatgaggtcctatgctctatttaaatgatgtttggttttaggctccattggcttctgtttctaccttctagcagacagacaactcctaaattcagggtgtctcctatacccctcttcctctcctgagtccccatctcctagtgaggtggttctatctctgcagctgcagaatattaatggcctgtggtttctgctgtaccccaaggcttcttgttaggggtcaacactgttgccaatacctcagtccctaagggaggagaggaggccaccactctcatcagttacctggggacaaaagggaggaatgtagagagcaaactgtcttgtatagactaataaaactagatttgatactaaaaaaaaaaaaaaaaaaaaaa

SEQ ID NO: 1084 - DNA, 3876 bp, Rattus norvegicus
  Genbank Accession No. NM_031604
ctcagattggagtgaacaaccatcgccaccatgggggagcttttccgaagcgaggagatgaccctggcccagctctttctccagtccgaagctgcttattgttgtgtcagtgaattagaagaacttggaaaggttcagttccgggatttaaatccagatgtgaatgttttccagaggaaatttgtgaatgaagttagaagatgtgaagaaatggatcgaaaactccggtttgttgagaaagagataagaaaagctaacatcccaattatggacactggagagaacccggaggtgccctttcccagggacatgatcgacttggaggccaatttcgagaagatcgaaaacgaactgaaggaaatcaacactaaccaggaagctctaaagcgaaacttcctggaactgactgaattaaaatttatactgcgcaaaactcagcagtttttcgatgagatggcggatccagacctgttggaagagtcctcatcactcttggagccaaacgagatgggaagaggcgcgcctttacgacttggcttcgtagctggtgtgattaaccgggaacggatcccgacctttgagcgcatgctttggcgagtgtgccgagggaatgtgttcctgagacaggctgaaatcgaaaacccgctggaggatcccgtgactggcgactacgtgcacaagtccgtgttcatcatttttttccaaggtgaccagctgaaaaacagggtcaagaaaatctgtgaagggttccgagcctccctctatccctgtcctgagactccacaggagagaaaagaaatggcttccggagtcaataccaggatcgacgatctccaaatggttctgaatcagacagaggaccaccgccagagggttctgcaggcggctgctaagaacatccgggtgtggttcatcaaggtgcggaagatgaaagctatctaccataccctgaacctctgcaacatcgatgtgacgcagaagtgcctgatcgcggaagtctggtgccccgtcactgacctggactccatccagtttgcactgcgaaggggcacggagcacagcggttccactgtcccctccattctgaacaggatgcagacaaaccagacaccccctacgtataacaaaaccaacaagttcacgcacggcttccagaacatagtggatgcttatgggatcggcacttaccgagaaattaacccagctccgtacaccgtcatcaccttcccctttctgtttgctgtgatgtttggagattttgggcacggcattttgatgactctgtttgctgtgtggatggtgttgagggagagccggatcctctcccagaagaacgagaatgagatgtttagcatggtgttcagcggccgatacattatccttctgatgggactgttctccatctacactggactcatctacaatgactgcttttccaagtctctgaatatctttgggtcatcatggagcgtacggccaatgttcaccatagggaactggacggaggagacgctcctggggagttctgtcctccagctgaacccagctatccctggagtctttggtggcccttacccatttggcattgatccgatttggaacatcgcaaccaacaagctgaccttcctcaactccttcaagatgaagatgtcagttattcttgggatcatccacatgctgttcggggtcagcctgagccttttcaaccacatctatttcaagaagcccctgaacatctactttggctttattcccgagataatcttcatgtcctcgctgtttggctacctggtcatcctcatcttttacaagtggacagcctacgatgcccactcgtctagaaatgccccgagcctcctgatccatttcataaacatgttcctcttctcctacccagagtctggtaacgcaatgctgtactctggacagaaaggaattcagtgtttcctcatagtggtggcaatgctctgtgtcccctggatgctgctgtttaagccgttgatccttcgccatcagtacctgaggaagaagcatttgggaactctcaactttggtgggatcagggtgggcaacggaccgacagaggaggatgctgaaattattcagcatgaccagctctccacccattcagaggacgcagaagagcctaccgaggacgaagtgtttgactttggcgacaccatggtccaccaggccatccacaccattgagtactgcttgggctgcatctccaacactgcgtcctacctgcggctctgggccctcagcctggcccatgcacagctctctgaagtactctggaccatggtgatccacatcggcctgcatgtccggagtctggcagggggactggggctgtttttcatcttcgctgcctttgccaccctgaccgtggccatcctgctgatcatggaaggcctctcagccttcctccacgcactgcgattacactgggtggaattccagaacaaattctacactgggactggtttcaagttcctccccttctcctttgagcacattcgggaagggaagtttgatgagtgagtctcaggcagggcgcatgctcagagcagctctcctgcctgcctctacagtgactgtgtctcttgcctgctggttgtgatccctggatactcgggcgtttgtgtcaccctacaacccctgtccccgctgtgactcatttaggttgtgctggccttccctgggtctctttctcccaagccttgggtgttacgtacagactttcgactgagagctggatggctgtgcctgatacccacccatccccatggcaccacttggcctcctggcctccagacagatagccctattccatcccctaatggtgagccaacctgcacagacacataggggcacggagccctcaggatgcaaggggtccctcatcagtccaggagttcttggtcacgccttggaggaagatggcaatgggttctctcctagaaggggatattgcttatggaacatacccgactccgctggcagggacagtcaggaagatgctgctgtcaccctttgtccagcctctccagtgagtattcaggaaactcagttggccctacctgggccatctcaaaggttccaggataacccccaccctcctagcccccaccctcctaaacactctcctcccccagccctgttggcacagcatagctagcatccgtagaatgggagggtcgcactgacttgcagcaccgggcttccggaccttagattcccttctctgtcagtgcgtgaatgggccttgccaacactacaccccaaggcagaagttaaaattggcacactcccggcatatccctgagcccttctgcaccctgatcatgatgtcctgaggctgtggtcagtaaggttggttctgccggcaggcctgccttgatctgcccacttattactccctctccaatccccatgctgaccccaggtttcaggagtggcgtcctggacagggaaggtcagtgtcatttacaatttgctaatcagaggcgactgttgggctaccagagcagatgtgggagcgctgctaagcccttgccgcctacctcatgtactgtggatctcagacccttctaatcatgtgctgactcccgaaattcactcactgccttccctgtggaggtaatactaaatcagcaaggcccctcccctcccccaccctggcgctcttgagccgctcccacggtgaattgttcagagcccctctgtccttttgtgcccagtttacatgatgatctctgctgtttacagagaggcccacagcagaggtctctgtggggaccctgcccaaggccttctgttcagacattcttatccggaataaagtgtgtttgactctgacaaaaaaaaaaa

SEQ ID NO: 1085 - DNA, 1957 bp, Rattus norvegicus
  Genbank Accession No. NM_031605
gggcatgagtggctcggctctgagcttcaccatattcccaggaagtatccttgggttcctccaaatagccactgtgctcactgtgctcctgctgctcctcaagacagcccagttctacctgcacaggcgatggttactcagagctacccagcagttcccatccccaccttctcactggttctttgggcataagatcccaaaggaccaggattttcaagatattctaacacgggtaaagaatttcccaagtgcctgtccacagtggctctgggggagcaatgtgcgaatccaagtgtatgaccctgaatacatgaagctgattctggggagatcagacccaaaagctcatggttcctacagatttctagctccctggattgggtatggtttgcttctgctgaatggacagacatggttccagcaccgacgaatgttgactccagctttccactatgacactctgaaaccttatgtgggcatcatggcagactctgttcgcataatgctggataaatgggaacagattgttggacaggattccaccctggagatcttccaacacatcaccttgatgaccttggacaccatcatgaagtgtgccttcagccaagagggcagtgtccagttggacagaaaatacaagtcctacatcaaggcagttgaggacctgaacaatctcttttttttccgtgtacagaacatgtttcatcagaatgacttcatctatagtctgtcctctaatggccgcaaggcccacaatgcctggcaacttgcccatgattacacagaccaagtgatcaaatcaaggaaggctcaacttcaggacgaggaagagttgcaaaaggttaagcagaaaagacgattggatttcctggacatccttctgtttgccagaatagaaaatggaagcagcttatctgataaggacctgcgtgctgaagtggataccttcatgttcgagggccatgacaccacagctagcggtatctcttggatcttctatgctttggccacaaatcctgaacaccagcagggatgcaggaaggagatccagagtctcctaggagatggagcttctatcacctgggacgacctggacaagatgccctacaccaccatgtgcatcaaggaagctctgaggatctacccacctgtaacagctgtgagcagaatgctcagcacacctgtcaccttcccggatggacgctctttacccaaaggtatcacagtcatgctctccttctatggccttcatcacaacccaactgtgtggccaaatccagaggtgtttgacccttatcgatttgcaccagagtcttcccgacacagccactcattcctgcccttctcaggaggagcaaggaactgcattgggaaacagtttgccatgaatgaactgaaggtggccgtggccctgaccctgctccgctttgagctgctgccagatcccaccaggatcccaatccccataccaagactcgtgttgaagtccaagaatgggatctacctgcgtctcaaaaagctccaataatcttgacagcacaagacagctccaacagcatgctgtctgccatttgtctttctgtcagtcactcttgtccccactccatctgctcacatctcattctttcttctcaccttgttcacctccacccaccttctgctgtgcttctggtctccttgtctgtcagtctttctatctcgacttctggaatttctacctgcttttctctctacctggcccctacctgacttcatgtttgaccttgaccttaatgatctccctaaattacaccctgccttctcttctgcatatttccttctattctactgtttgtctgtgcttaaattgagctttataccaatgtcataattgattacaatagaagtattgccctatgattcgatataccaggtgtttttcatgatttcattagaataaagctcaggtcattgc

SEQ ID NO: 1086 - DNA, 3360 bp, Rattus norvegicus
  Genbank Accession No. NM_031614
gccttgcagcggcgcgggcaaacggagaggccgcgggaggcgcgaagccggcagaaggcgagggagagcggagggcggccatggtccagccctgaagccaaacaaaaaaggcctacttcgaaagctgtcaacaatgaatgactctaaagatgcccctaagtcctatgacttcgacctgatcatcattggaggaggctcgggaggcctggcggcagctaaggaggcagccaaatttgacaagaaggtgatggtcttggacttcgtcacaccaactcctctcggaacgaatgggggtctcgggggaacgtgtgtgaacgtgggctgcatacctaaaaaactgatgcaccaggcggctctgttaggacaagctctgaaagactcacgcaactatggctggaaactcgaggacacagttaagcatgactgggagaaaatgacagaatctgtgcagaatcatatcggctcgctgaactggggctaccgagtagctctccgggagaagaaggtcgtctatgagaatgcttacgggaaattcattggtcctcacaaaattatggcaacaaataacaaaggtaaagaaaaagtttactcagcagagcggttcctcattgccaccggtgaaaggccacgctacctgggcatccctggagacaaagagtactgcatcagcagtgacgatcttttctccttgccttactgcccggggaagaccctagtggttggcgcgtcctatgtcgccttggaatgtgcaggattcctggctggtatcggcctcgacgtcactgtaatggtgcggtccattctccttagaggatttgaccaggacatggccaacaaaattggtgaacacatggaagagcatggtatcaagtttatcaggcagttcgtgccgacgaaaattgaacagattgaagcagggacaccaggccgactcaaggtgaccgctaaatccacaaacagtgaggagaccatagaagacgaatttaacacagtgttgcttgcagtaggaagagattcttgtacaagaactattggcttagagaccgtgggcgtgaagatcaatgaaaagaccgggaagatacctgtcacggatgaggagcagaccaatgtgccttacatctacgccattggtgacattctggaggggaagctggagctgacccccgtggccatccaggcggggagattgctggctcagaggctgtatggcggctccactgtcaaatgtgactatgacaatgtcccaacgactgtgtttactcctttggagtatggctgctgtggcctctctgaagaaaaagctgtagagaaatttggggaagaaaatattgaagtttatcacagtttcttctggccattggaatggacagttccatcccgggataacaacaaatgttatgcaaaagtcatctgtaaccttaaagacaacgaacgtgtcgtgggcttccacgtactgggtccaaatgctggagaggtgacgcaggctttgcagccactcaagtgcgggctgaccaagcagcagctggacagcaccattggcatccacccggtctgtgcagagatatttacaacgctgtcggtgactaagcgttctgggggagacatcctccagtctggctgctgaggttaagccccagtgtggatgctgttgccaagactacagaccattgcttgcttccttgtccacacccaggtgaagttcaggaaggctcttgggttcttggcaccaattcaaggtgctatcctaaggccaccaggtccctgggatcttgtgggtaggaggtggcaggtagaagaaggctgcagcatcgcactggggtcaccatgacggactcagactgacattcggcagagcatcacggtgcgtccatgaagtcactagcctcaagcccaagtggtgggcagtgacagaaagctgtcgatctgttgggttcaacctttccctgtagactgttttagtctcgccttcaagctatgtaatgtcaattctgttttttcttttctccatggggttaatgatactagaggtagggaatgttagcaatcagtttttgtcatggctggactatccacagcacggtcgttactgtgtggaagggggtcagatggcttatgagagccaaaccagtttatcctgagaaagacgaattaccctgtggctaaaatacactgtttttactaacctgtgtagcattgtcccctttaataagtttaggtcttctgtccaaactgagaaaaaccatggtcactttggcaaatttccggcagtgtgtgtccctgccgctgcttagcaagggcggcggtgacttggctaatctactcagactcattgcatggctcttgggtatcatggagtattccagcatagagcctgaccagcagtaaatgtctctcctggtacagttactgtctgctggactaagtgcgctgagatggttctcaatggagaatgcttaatttgcttttaacctcttgtttttgtgaggtgggtttagttttaagcttatgtcccataagaactccattcacaggcaagcagctctttccgcacacagcatatgcatcttctgaggtaatggctttataaggaagctgttcataacataagttattattattattgaacacaggtggatgtgaaggattttttttcattgaagaaccaaatggtttttcttttttctgttcagtgagcccacagagaccctggcaggaacagcattgctggcagcattgctgctgggcttttccagtgtagttcttgctcctaggtcacgtgacagcgaacacgatgcctgaggaccgcgcagacaggtttcccaccgcacagccgcccaaggtcccgccatggtccggtagctccttttcttgtcctcccctctgcccatctccacctgcagtactgagtggcgtttcccagtaccctttggggccacctcagggaacgggtttgcctggtattcagccagcggcacccaccctgccccacgaggctccctcagatccgccccacatccgtgtgttgaagaggagaaaggaccagggaaccaaaggagtggactgttgagttttatttatttattttttgtttttttttctcctaagtctgccagtctctgagatcagaacgacagtgtagggtagccgcctaatcatgttgtgattctattggtgggatgaaatgttccgcccccatggaaggagtacactcgtcgtttatgttctgtaatcgcacaatgtactgtaacccaaattccaattccatgtatttttattacagtttctctgggaaaaaaaaatgtgaaacaataaaaaggtgttgattcacgaaaaaaaaaaaaaaaaaaaaaaaaaaaaaaa

SEQ ID NO: 1087 - DNA, 1803 bp, Rattus norvegicus
  Genbank Accession No. NM_031620
agtcagcgtaaattgtgcgtgttaaagctcaccaggtacaggccttcagtttcctgtactaagtgcttctgcccaccagagcaaccgattctaaggcctggctctagcaatggccttcgcaaatctgcgcaaaatactcatcagtgatagcctcgacccctgctgccggaagatcctgcaagatggagggctgcaggtggtggagaagcagaacttgagcaaggaggagctgatagccgaactccaggactgtgaaggccttatcgtccggtcagctactaaggtcactgctgatgtcatcaatgcagcagagaagctccaggtggtgggcagggctggtacaggcgtggacaatgtggatctggaggctgccacaaggaagggcgtcctcgtcatgaacacccccaatggaaatagcctcagtgctgcggaactcacctgtgggatgctcatgtgcctggccaggcagatcccccaggcgacggcttcgatgaaagatggcaaatgggaccggaagaagttcatggggacagagctgaacgggaagacactgggaattcttggcctgggcagaattggaagagaggtggccgcccgaatgcaggcctttggaatgaagactgtaggctatgaccccatcatttctccagaagtcgctgcctcctttggtgttcagcagctgccgctagaggagatctggcctctctgtgatttcatcactgtccataccccgctcctgccctccactacaggcttgctcaatgacagcacctttgcccagtgcaagaaaggcgtgcgggtggtgaactgtgctcgaggaggcattgtggatgaaggtgccctgctccgtgccctgcagtctggtcagtgtgctggtgctgcactggatgtgtttacagaagagccaccacgggaccgggccttagtggaccacgagaacgtcatcagctgtccccacctgggcgccagcaccaaggaggcccagagccgctgtggggaggaaatcgcagtccagtttgtggacatggtgaaggggaaatctctaacaggggttgtaaacgcccaggctcttaccagtgccttctctccacacaccaagccttggattggtctggcagaagcattgggcacactgatgcacgcctgggctggctcccctaaagggaccatccaggtggtgacacaaggaacatctctgaagaatgctgggacctgcctgagccctgcggtcattgtcggccttctgagagaagcatcaaaacaggcagatgtgaacttggtgaacgctaagctactggtgaaagaggctggcctcaatgtcaccacctcccacagtcctggtgtcccaggagagcagggcatcggggaatgcctcctgactgtggccttggcaggtgctccctaccaagctgtgggcttggtccagggcaccacaccaatgttgcagatgctcaacggagctgtcttcaggccagaggtgcctctacgcaggggccagcccctgctcctgttccgggctcagccctccgaccctgtcatgctgcccactatgatcggcctactggcagaggcgggggtacagctgctgtcctaccagacctccaaggtgtctgacggagacacttggcacgtcatgggcctctcctccctactgcccagcctggacgcatggaagcagcatgtttctgaggctttccagttctgcttctgacccaggggctcagcggtcccagcccctcaggctcttctgaggaaacccgctcactgtgacctgaactaatatctagtaaagaatctaactcc

SEQ ID NO: 1088 - DNA, 1356 bp, Rattus norvegicus
  Genbank Accession No. NM_031642
ggagactgtcttttccaacccgacatggatgtgctcccaatgtgtagcatcttccaggaactacagattgtgcacgaaacgggctacttctcggctctgccgtccctggaggaatattggcaacagacctgcctggagttggaacgctatcttcagagtgagccctgctacgtgtcagcctctgagataaaatttgacaaccaggaagacctgtggaccaaaatcattctagcacgggagaggaaggaggaatcagaactgaagatttcttctagtcccccagaggactctctgatcagctccggctttaattataacttagagaccaatagcctgaactctgatgtcagcagcgaatcttcagacagttcggaggaactttcgcccacgaccaagtttacctctgaccccattggtgaagtcttagtcaattcaggaaatctgagttcctcggtcatttccacacctccttcttctcccgaagtaaatagggaatcttctcaactatggggctgtgggccaggagacctgccctcacctgggaaggttcgaagtgggacctcggggaagtctggcgacaagggtagtggcgacgcctccccagatggcagaagaagggtacatcggtgccattttaacggctgcaggaaagtttacactaaaagctcccacttgaaagcacatcagcgcactcacacaggagaaaagccttacagatgctcttgggaaggttgtgagtggcgttttgcaagaagtgatgagttgaccagacacttccgaaagcatactggtgccaagccctttaaatgctctcactgtgacaggtgtttctccaggtctgaccacctggccctgcacatgaagaggcatctctgagggagcagaggatgaatcctgtaggctaaaagaggcttccaggctaagaggcggccatggaaggagggatacctgtaccagccaaagcatgccattgcttcctacccagttacctccagaggcctctctttggaaggtcttttgagggctacaaaagtcatgtcagaagcggcatagcacccacggtgcatggtgtttgggtgaccccggactcaccactggtttctaaccttctgagaggctctaagcttttcgccgtgagcatgcgcactgagaatgttaatgggtgggaatgactgactgtatgttgaggatctattactgactgtatggcgaggcagactttttttttccccccttgtggtagcaaatacctgcaagagacagaaaaaaaaagcagtttgaatgttttgtgtgtgaggagtattccaagggatgagttgaccaccaatcatttcctgaagggtgtctgcaccttag

SEQ ID NO: 1089 - DNA, 1087 bp, Rattus norvegicus
  Genbank Accession No. NM_031655
ggaagagggaagaaggcgctgaggaccgcgcacgcccagcccagctgctgacttcaccacctcaccgagacccactccgctggccagcacgctacactgacaggatcctggctgcacccactgtgatctctttgaactaggatagcccgcgctcactgtttccctgaagatggaagaaatcccacccacccactacgctgcgtccagggctgcctcggtggcagagaactgtataaattatcagcaagggacccccaacaaggtattcaaggtgcagacggtccagcaggcaagcaaggaggatatcccaggaagaggccacaagtaccatctgaagttttctgtggaagaaattatccaaaaacaagttacagtgagctgcacggctgaagttctttaccctcgaatgggacaaggctctgcaccggaagtcaacttcacatttgaaggagaaatcggcaagaacccagatgaggaagacaacacgttttatcaaagactcatgtccatgaaggaaccactacaagcacaaaatattccagacaattttggaaatgtgtctccacaaatgaagccggtccaccacttagcctgggtcgcctgtggttatgtaatgtggcagaactcgactgaagacacatggtataaaatggcaaagattcaaacggtcaagcaagtgcaaagaaacgatgacttcattgagttagactacaccgtcctactccacgacgttgcatcgcaggagattatcccctggcaaatgcaagttctgtggcacccacaatacggcacaaaagtaaagcacaacagccgcctcccaaaggaagcaccagcagagtaaacaagaccccaactcggagacagccgtcaacatgccccttaaccatgagtatgactgtcctcactggcacctagctaacaggccaagtgaatcccacagtgtcgctctgtatgtcttggctacaggaccgagctgcatagattccacaataaagagtagactacatgaaagtgtctttccaatagtaatggtactatggctatccactaataaagtcaacttcagcctcacaaaaaaaaaaaaaaa

SEQ ID NO: 1090 - DNA, 3923 bp, Rattus norvegicus
  Genbank Accession No. NM_031672
ctgaggctggcagctactgaaactgacacacacagggttaaacctatttgctgtggccatccctcctccccctagtcccccttttcactgtaggctggcagcagtcctaactgcctactgaagccaaatgcttgaggagagagagagtaaggagccagccatgaatcctttccagaaaaatgagtccaaggaaacgcttttttcacctgtctctactgaggagatgctgcctagacctccgagccctccaaagaagtcacctccgaaaatctttggctccagctacccagtcagcattgccttcatcgtggtgaatgaattctgcgagcgattttcctattatggcatgaaagctgtgctgaccttgtacttcctgtatttcctgcactggaatgaagacacgtccacctctgtctaccatgccttcagcagcctctgctatttcactcccatcttgggtgcggccattgctgactcctggctgggaaaattcaagacaatcatctatctctccctggtgtatgttcttggccatgtattcaagtctttgggtgccataccaatactgggaggaaaaatgctacatacaatcttatcattggttggtctgagtctaattgctctgggaacaggaggtatcaaaccctgtgtggcagctttcggcggagaccagtttgaagaggaacatgcagaggcacggactagatacttctcagtcttctacctcgccatcaatgcggggagcttgatttccacgttcatcacacccatgctgagaggagatgtgaagtgttttggccaagactgctatgcactggcttttggagttccaggattgctcatggtgctggcacttgttgtgtttgcaatgggaagcaagatgtacaggaaaccacctcctgaagggaacatagtggctcaagttatcaaatgcatatggtttgctctctgcaaccgcttcaggaaccgttctggggaccttccgaagcgacaacactggctagactgggcagcagaaaaatatccaaagcatctcatcgcagatgtgaaggccctgaccagggtactgtttctttatatcccactgcccatgttctgggcacttttggaccaacagggctcgcggtggactctgcaagctaacaagatgaatggtgacttgggtttttttgtacttcagccggatcagatgcaggtgctaaatccctttctggttcttatcttcatccccttgtttgaccttgtcatttaccggctgatctccaagtgcagaattaacttctcatcactcaggaaaatggcagttggtatgatcctagcgtgcttggcttttgcagttgcagcacttgtcgagacaaaaataaatggaatgatccatccccagccagcttcccaagagatatttttacaagtcttgaatttggcagatggtgatgtaaaggtgaccgtgctgggcagtagaaataattctctcttggtggagtccgtcagctcttttcagaacacaacgcactattcaaaactacacctggaggcaaagagccaagatttacattttcatctgaagtataacagcttgtctgtccacaatgaccattctgtagaggagaagaactgttaccagctgctcattcaccaggacggggagagtatctccagcatgctggtcaaggatacaggaatcaaaccagccaatgggatggcagccatcaggtttattaacactttgcataaagacttgaacatctccttggatacagacgctcctctcagcgtgggcaaagactacggagtgtctgcatacagaactgtgctaagaggaaagtatcctgcagtgcactgtgaaactgaagacaaagtcttttctctcgatttaggtcaactagactttggtacaacatatttgttcgtgatcactaatatcaccagtcagggtcttcaggcctggaaggcagaggacattccagtcaataaactatccattgcatggcagctaccacagtatgtcctggttacagcagcagaggtcatgttctcagtcacaggacttgaattttcttattctcaggcaccatctagcatgaaatctgtgctccaggcggcctggttgttgaccgttgcagttgggaatatcattgtgcttgtcgtggctcagttcagtggcctggcacagtgggccgagttcgttttgttttcctgcctcctcctggtggtctgcctgatcttctccgtcatggcctactactacgttcctctaaagtcagaagatacccgtgaggcaacagataagcagattcctgccgtgcaggggaatatgattaacctagaaaccaagaatacaaggctctgatgacttgctgatggatacctgacccctggctctgatttcagccactgcttattttcaagcaacaaccattttcctcaggccaggttaggagaaggagacagcatctatctgaatggattgcctccagttccctaccacagtagaggcaattctaggactaagttttcagatacatctttaaacagggatccgagactccgtgccctacaggccgttgatcaacttggtaaacgtcaggtgatgtctctcaggctggcccagtatctccgagtgcccatgaaaaatacaaatgtgtagaagagataagtctcacgggtctgctaagtttgagggattcctttaccaggtatttggagcctatagctctacttgtcgatgtgttggttacagaatactggttttccaagtttctttatcagtcgtataacttcgctattcatgaggatgtcaaaaaacgttacatatagtatgacccaatccagaggctagcttgtcagctaggaagtctaacatgattttaatagatggcagactatagaatggcgttgtatctacacatggaagatacctcttttctgatttaccacagtggtttatcaacttacccaaccaggcttttctcagatcctgaaaaccacaattaaggacagtagtcagaatcgtggggacacgggggtgcacataaactattcattctcctgtactacaggatactaaagaactctcctgctcctggcctgggcgtgctcctctgtgaacatctgtctaagaaactaactataactttgcaacccaggcttttccgtggcgctgggacagcttatctttttcagtgcatcttattctgcgtattacagcaagtcttcaataacaaaatgttcttctaacccaacttcctgtaatttttttctatttagctcctttgttatgcatctttacttttcctgtaatttttgtttacatttctccctttgggcttagcagtttcttgtttattgaaaagggataatactaacatcctaggtctgaagcgctaaactgtgctagtcatcaaatggacaaggacctgcatgagaaacttattaaaaatctgtggcgaggtgggacaggtgcaggttttgtttgtgcgtgtgaacaaaaggagttgagaggcattgtctcacgtgtaataacgtgggtcaggggacgagtttgggatgtcaggactgtgtcatgtattcctaggagaaaacgttccctgcccctatatgaaagacctctcatttctgttccttttactacactgttcccttcaacggccatgttgaattgcacattattagtaatgtaatatattcttaagcgaatctgctccagttcgtcaagctttaaatacttcagtatttaagtaccgagatttcagaaagcataaaagaggtcacaataccatctactttcctcagatgacttaatgagaacctgtccagactcctttagaaggtgttcactttccagaagctttaactcaaactctttgatgaattttgttttaaaagatgttaacactgatctgtgaataaaattttttacatac

SEQ ID NO: 1091 - DNA, 917 bp, Rattus norvegicus
  Genbank Accession No. NM_031682
ggctcgtgcaagatggctgcggcgtgtcggagcgtgaagggcctggtggcagtaataaccggaggagcctcgggccttggcctgtctacagccaaaagactggtgggacaaggagccacagctgtacttctggacgtccctaactcagagggtgagaccgaagccaagaagttaggaggaaactgcatatttgccccagcaaatgtgacctctgagaaggaggtacaagcagctttgactctagcaaaagaaaagtttggccgtatagatgtggctgtcaactgtgcaggcattgcagtggccattaagacataccacgaaaagaagaaccaggtccacaccttggaggacttccagcgggttatcaatgtgaatctcataggcactttcaatgtgatccgcctggttgctggtgtgatgggccagaatgaaccagaccagggaggtcaacgtggagttatcattaacactgccagtgtggctgcttttgagggccaggttggacaagctgcatactctgcatccaaagggggcatagtgggcatgacactgcccattgctcgagatctggctcctataggcatccgtgtggtaacaattgctccaggtctgtttgccaccccactgcttaccactctgccagacaaagtgcgcaacttcttggccagccaggtacccttccccagccgactaggtgaccccgcggaatatgctcatctggtacagatggtaatcgagaacccattcttgaatggagaggtcatccggctggatggggccattcgaatgcagccttaaaaggccaaggcaggaaaaacaccggctccttttcagtttgaaggaaacctaacagccactttgtaactttgctccattcaccctctgtgcctaataaattctcaaatctgaaaaaaaaa

SEQ ID NO: 1092 - DNA, 2060 bp, Rattus norvegicus
  Genbank Accession No. NM_031693
gctgcaggaattccctcttactttcaatcagtgaaattgaccttccggtgaagaggctggaatctcccaataagacgagaagacccaacaggaacagggcagggtggcacattgctgatagagagcgcggaccttcctccagcccctcccgctgccgctgccggtccccggatcccccgtgtttcccctggaagccttgtttcagggtccttccaggtgaatctgcctggagttctttcagcacctcggacagagcacgcagaaaacatggctcctatcaccaccagccgcgtggaattcgatgaaattcccacagtggtgggcatcttcagtgcttttggcctggtcttcactgtgtctctctttgcctggatctgctgccagagaagatccgctaagtccaacaagactcctccatacaagtttgtgcacgtgcttaaaggagttgatatctacccagaaaacctaagtagcaaaaagaagtttggaggagatgacaagagtgaagcaaagcgtaaagcagctttgcctaacctttccctgcaccttgatctcgagaagcgagacctcaatggcaatttccccaaaaccaaccccaaagctggcagctcttctgatctggaaaatgtcaccccaaagctctttccggagacggaaaaggaggccgtctcccctgagagcttgaagtccagcacttccctcacttcagaggagaaacaagagaagctgggcactctcttcttgtctctagagtacaacttcgagaagaaagcatttgtggtgaacatcaaggaagcccagggcttaccagccatggatgaacaatccatgacctctgacccatacatcaagatgacaatcttaccagagaagaagcacaaagtgaaaaccagagtgctgaggaagacgctggaccccgtgtttgacgaaaccttcacattctatggggtcccttatccccacatccaagagctgtccctgcacttcaccgtcctgagttttgacaggttctcaagagatgatgtcattggagaagtcctcgttcctctttcagggattgaattgtcagacgggaaaatgttaatgaccagagagatcatcaagagaaatgctaagaagtcttctggacggggtgaacttctggtctccctctgttatcagtccactacaaacacgctcactgtggttgtcttaaaagcgcggcacctaccgaaatctgatgtgtctggactttcagatccctacgtcaaagtgaacctgtaccatgccaagaagagaatctctaaaaagaagactcacgtgaaaaagtgcactcccaacgcagtgttcaacgaactgtttgtctttgatattccttgtgagagtcttgaagaaataagtgttgaatttttagttttggattctgaaaggggatcccgaaatgaggtgatcgggcggttggtcctgggtgccacagcagaaggaagtggtggggggcactggaaggagatctgtgacttccccaggagacaaattgctaagtggcatatgctctgtgatggttagcttcctggccaccagctacaacttaaaggtttttactaggcgagaagcaattttctttcttatacgcgattgtaagcttgtggcccagcaagctactttactatttatttgttttggttagaagtggattaaattagtagaccagaagatagctgtaaatgtgtattatgataatttcctcttttattagaggcgttggccaagttttcataagatactgtttccctctgtgtgtattaagtgggccaaccaagcctgttatgagcattctagcttaacctcaagtcacagatgtgtgttgtgggtgatttcattttttgccttggtagtggaaatcaggtgattgttaagagttaaaagtgggaaaaaaaacaaacctaagctagaatttcagttaggaatacagttgttttttatataaaaatctatcagtgtacaagtgtattttcaagattgtctttccccctcacagtggacatggccacctaagttttttaacttactctttcccaggc

SEQ ID NO: 1093 - DNA, 2234 bp, Rattus norvegicus
  Genbank Accession No. NM_031698
ctcggaggaatggcgccgccgggttcaagtgctgtcttcctgttggccctgacaatcacagccagcacccaggctctgacccccacccactacctcaccaagcatgatgtggaaagactgaaagcctcactggatcgccctttcacgagcttggagtctgccttctactccattgtgggactcaacagccttggggcacaggtgccagatgtcaagaaagcgtgtgccttcatcaagtcaaaccttgatcccagcaacgtggattctctcttctatgctgcccaatccagccaagtcctctcaggttgtgagatatctgtttcgaatgagaccagagatctgcttctggcagcagtcagcgaggactcctccgttgcccaaatctaccatgcagttgccgccctcagtggctttggtcttcccttggcatcccatgaagcccttggtgcccttaccgctcgcctcagcaaggaggagactgtgctggcaaccgtccaggctctgcacacagcatcccacctatcccagcaggctgacctgaggaacattgtagaagagatcgaggaccttgttgctcgcctggacgaactagggggtgtgtatctccagtttgaggaaggcctggaacttacagcattgtttgttgctgccacctacaagctcatggaccatgtggggactgaaccgtccatcaaggaggatcaggtcatccagctcatgaacacaatcttcagcaagaagaactttgagtccctctcagaagccttcagtgtggcctctgctgctgctgcattgtcccagaatcgctatcacgtaccagtggtggttgttcctgagggctctgcttctgacactcaagaacaggctatcctgcggttgcaagtcagcagtgttttgtctcacgctctggctcaagccgcagttaagctggaacatgctaagtccgtggcttccagagctactgtcctgcagaagatgcccttttcacttgtaggggatgtttttgagctaaacttcaagaatgttaaacttcccagtggctactatgacttctctgtcagagttgaaggtgacaaccgttacattgcaaacactgtagagcttagagtcaagatctccactgaagttggcatcaccaatgctgatctttccactgtggacaaggatcagagcatcccacccaaaactacccgggtgacctacccagccaaagccaagggcacattcatcgcagacagccatcagaacttcgccctgtttttccagctggtagatgtgaacaccggtgcggagctcacccctcaccagacatttgttcgacttcataaccagaagactggccaggaagtggtgtttgttgctgagccggataacaagaatgtgcataagtttgaactggacacctctgaaaggaagattgagttcgactctgcctctggcacttacacactctacctaatcatcggggacgccactttgaagaaccccatcctctggaacgtggctgatgtggttatcaagttccctgaagaagaagctccctccactgtgctgtcccagaacctttttaccccaaaacaggaaattcagcacctgttccgagagcctgagaagaggccccccactgtggtgtccaatacattcacggccctcatcctctcgcccttgctcctgctctttgcactgtggatccggattggagccaatgtctccaacttcacctttgctcctaccacgattatctttcacctgggacatgctgcaatgctggggctcatgtatgtctactggactcagctcaacatgttccagaccctgaagtacctggccgtcctgggcactgtgacatttctggctggcaaccgaatgctggcccagcaggcagttaagagaacagcacattagttccagaagaagtttgaagaccctgaactcggaaatgaccgtttaacaaagagtggagacagttcagagtgtggaaagaatcgggggacagaataggagaagaggaaatacctgttatttaaagagagaaaagtcgagctatgcttacacgtttacttgtttctcactttttgcttcactgaacagatatgtttggacccagattgtctgtccctttgttgtgatgcctggccagattctgtgaatatcccaggttacccagaggttgtatttgaaaagttgaaatctgtaattcatcagctttggaataaagagaatggtggactccc

SEQ ID NO: 1094 - DNA, 1192 bp, Rattus norvegicus
  Genbank Accession No. NM_031700
ggaaaggagccgttagcgtgctccgtccattgccatccaccggtcgttcccggcgacagacctccgtcaacttttgaaggggagttggttctcaggtccagcggccgcgatccctggtctcccagcctacggagttacccggcggagttcaagtccagcagccatgtccatgagcctggagatcaccggcacgtcgctggccgtgctgggctggctgtgcaccatcgtgtgctgcgcccttcccatgtggcgcgtttcggcattcatcggcagcagcatcatcacggcgcagatcacctgggaaggcctgtggatgaactgcgtgcagagcaccggccagatgcagtgcaagatgtacgactcgctgctggccctgccgcaggacctccaggccgcccgagctctcatcgtggtgtctatcctactggcagccttcgggctcctcgtggcgctcgtgggggcccagtgtaccaactgcgtacaagatgagacggccaaggccaagatcaccatcgtggcgggagtgcttttcctgttggcggctgtgctcaccttagtgccggtgtcctggtccgccaacaccatcatccgggatttttataacccgctggtacctgaggcccagaagcgagagatgggaactgggttgtacgtgggctgggctgccgccgcgctgcaattgctagggggcgccttgctgtgttgctcctgcccaccacgcgagaagtacgcacccaccaagatcctctattccgcgccgcgatccaccggccctggcaccggtaccggcaccgcctatgaccgtaagactacgtctgagaggccgggtgcgcgcacaccgcaccatcaccactaccaaccgtcgatgtaccccacccgtccagcgtgcagcctcgcctcagagaccaccccaccttccagacggttacagacgccacgcagtctgcttgctaggctggaagaggacagacagcctggcgtccccttttctccggttgccacctgattacctggcctaggaactgtccaagtcgaatggacaaagacacctcgcccttcccaagtacagggttggggtggccatcgcagctacttgccagccccgcagccagaaggctcatagtgggcagagacaggcaaactataaaaagggccgtttcgtatttttcaataaaagcctttcgtttttgca

SEQ ID NO: 1095 - DNA, 2091 bp, Rattus norvegicus
  Genbank Accession No. NM_031705
attttcaagggccagcgagagagggagtttggcacagtttgtggagaactcaaagaaaaaccaactctgttcgcagtccccagctcctccagccatggcaccacaagaacgacttctcatccgcgggggtcgcgtggtcaatgatgacttctcacaggtggccgacgtgctagtggaggacggcgtggtgcgggcgctgggacgggacttgctgcctcccggggacacatcccgggggctgcggatcctagatgcagcgggcaagctcgtcctgccgggaggcatcgacacacacacgcacatgcagttcccgttcatgggctcgcagtcagtcgacgacttccaccagggcaccaaggctgctttggcaggaggcaccaccatgatcattgattttgcgattcctcagaaaggcagctccctcattgaagcttttgagacctggcgcaactgggcagaccccaaagtctgctgtgactatagcctgcacgtggcagtgacatggtggagtgacaaggtaaaagaagaaatgaaaacccttgcccaagataaaggcgttaactctttcaagatgtttatggcctacaaagacctgtacatggtgcaagaccagcaaatgtacgctgccttttctcagtgcaaggagataggggccattgctcaggtgcatgccgagaatggagatttgattgcagagggggccaagaagatgctggcactggggataacgggccccgaggggcacgagctgtgccgcccggaagcagtggaggcagaggccaccttgagagccatcaccattgctagcgctgtgaactgccctctatacatcgtgcacgtgatgagcaaatccgcagcgaaggtgatagctgatgcgaagagagaaggaaaggtggtctatggagaaccaattgcagcaggtctgggcacggatggcactcagtactggaataaagaatggcgccatgcagcccaccatgtcatgggtcccccactgagacctgatccatcaacgcctggctttctcatgaatctgttggctaatggcgatctgaccacaacagggagtgacaactgcactttcaacacctgccaaaaagctctagggaaggatgacttcactaagattcccaatggggtgaatggtgtcgaggacaggatgtcggtgatatgggaaaagggcgtgcacagtggcaaaatggatgaaaatagatttgtggcagttaccagcacaaatgcagccaaaatctttaatctttatccgaaaaaaggaagaatagctgtaggctcagatgctgacatggtgatctgggacccagaagccaccaggacgatctcagccaaaacacatcatcaggccgttaacttcaacattttcgagggcatggtttgccatggggtgcccctggtgactatttcaagaggcagagtggtgtatgaagcaggcgttttcgacgtcacagcaggacacgggaagtttattccgcgacaacctttcgctgagttcatttacaaacgagtcaagcagcgagaccagacctgcacacctataccggtgaagcgtgcgccctacaagggagaagtcatcacattgaaacccagagagacaaaagaagacgacacagctgggaccaggatgcagggccattcctgatttggatgctggggttaagcaagtgcaaacagagtgaaggctcccaggctcccctccccaccatgctgccaagccctggagaagcacctgccatttcaactctccaagatcctttaggaaaaattcatcgctctaggcctctttgatttttctctcagaagcaatagcagcctgcctcaccctgcctttgttgctgtggaagattgaggatataaatgaacattattgggatgaaacgtctgcatgaagattcattgaagattcctttttcaaatgccatctctccttaccctagatttctttctttgggtttttaaagatttccttctggtgtaaaggttttgtttgtttgttttgttttaatgtttatgtttgttttaaaaatcagtgattttacatttcattgcaactaataaacatctggagcttcattctgc

SEQ ID NO: 1096 - DNA, 696 bp, Rattus norvegicus
  Genbank Accession No. NM_031706
ctctttccagccagcgccgagcgatgggcatctctcgggacaactggcacaagcgccgcaagaccgggggtaagagaaaaccctaccacaagaagcggaagtatgagctgggacggccggccgccaacactaagattggccctcgccgcatacatacagtccgagttcgaggaggcaataagaagtatcgtgctctgagattggatgtggggaacttttcctggggctcagagtgttgtactcgcaaaacaaggatcattgatgttgtctacaatgcatccaataacgagcttgtccgcaccaagaccctggtgaagaactgcattgtgcttattgacagcacaccgtaccgacagtggtacgagtcccactatgcactgcccctgggccgcaagaagggggccaagctgactcctgaggaggaagagattttaaacaaaaaacgatcaaagaaaattcagaagaaatatgatgaaaggaaaaagaatgccaaaatcagcagtcttctggaggagcagttccagcagggcaagcttctcgcctgtattgcctcaagaccaggccagtgtggcagagcagatggctatgtgctcgaaggcaaggagctggagttctatctgcggaagatcaaagcccggaaaggcaaataaactgtcatagctcgtgtaataaaggtgtttgctgttctgtatatgt

SEQ ID NO: 1097 - DNA, 2005 bp, Rattus norvegicus
  Genbank Accession No. NM_031712
gtgagttccaagactagtagtgttcacagcagggagaatttctagtgacggagcggatccttctccacagaaatggcctccaccttcaaccccagagagtgtaaattgtccaaaaaagaggggcagaactatggcttcttcctccgcattgaaaaggacactgacggtcacctggtccgggtgattgaggaggggagcccggcagagaaggcagggctcctagacggcgacagagtgctcaggatcaacggggtctttgttgacaaggaagagcatgcacaggtggtggatctggtcagaaagagcgggaattcagtgaccctgctggttctggatggagactcctatgagaaggctgtaaaacatcaggtggacttgaaagaactggatcaaagcccaagggagccagctctgaatgaaaagaaacccgaccttgggatgaatggaggggtggagacgtgtgcccagccacggctctgctacctggtgaaggagggcaacagctttggcttctctctgaaaactatccaaggtaaaaagggcgtgttcctgactgatataacacctcagggcgtggccatgaaagctggtgttctggctgatgatcacttgattgaagtgaatggagaaaatgtagaaaacgccagtcatgaggaagtggtggaaaaggtgacaaagtcaggaagccgtatcatgttcctccttgtggacaaagaaactgccaggtgccatagtgagcagaaaacaccgttcaagagggagacagccagtttgaaactgctgccccaccagccccgggtagtagtgatcaagaagggcagcaatggctacggtttctatctgagggcgggccctgaacagaaaggtcaaatcatcaaggacatagaacctggaagcccagcagaggcagctggcttgaagaacaatgacttggtagttgctgtcaatggcgagtctgtggaagctcttgatcatgacagtgtggtggaaatgattagaaacggtggagaccagactactctgttggtgctggacaaggaggcagacagaatctatagcctggctcgtttctctccacttctctactgccaaagtcaagaactgcctaatggttctgtgaaggaagccccagctcccatctctgctcctctggaggccccaggctcagctaccacagaggacgtgggggatcataaacccaagctctgcaggctgattaaagaggacgacagctacggctttcacctgaacgccattcggggccagccaggctcctttgtcaaggaggtacagcagggtggccctgctgacaaggcagggctggagaatgaggacatcatcattgaagtgaatggggagaatgtgcaagatgaaccctatgacagagtggtggagagaatcaagagcagcggggagcacgtcactctgttggtctgtggaaaggtggcctacagctattttcaagctaagaaaatccccatcctttcttccttggctgaccccctggtggctggtcctgatgaaaaaggagagactgagcatgactcagcagagtccacgaaagactcctcccacccagcaagagaccgaactctcagcgcagcctcccactcttcttccaactctgaagacacggtgatgtgaagagaacaaacgacgtttcccctcatggtccgaggaaggagcccctcggaccctgccagacctcctcagaaccatcagtccctgaccgaaactgcggactgtctgtctgtctgtctgctgctgtaagggctgctactgcaggctgcttatttatgctcagcttagctggagggagggccgggttccggttctttctatgtggtatcttccaacgtgcaacttttcacttctgttgatgaaactttgatgaaacgtcttacttctgtgggcttgagcactgggatgattcatttgtgtcttgtgagtgatgatgattaaagtacccagcagacctttaaaaaaaaaaaaaaaaaaaaaaaaa

SEQ ID NO: 1098 - DNA, 2757 bp, Rattus norvegicus
  Genbank Accession No. NM_031715
gccagcgaggagagctaaaactacaagagtggatcatgacccatgaagagcatcatgaagccaaaaccctggggatcggcaaggccatcgccgtgttgacctctggtggagatgcccaaggtatgaatgctacggtcagggctgtggtacgagttggcatcttcaccgggctccgcgtcttctttgtccatgagggttaccaaggcctggtggatggtggagagcacatcagggaggccacctgggagagcgtgtccatgatgctccagctgggaggcacggtgattggaagtgcccgatgcaaggacttccgggagcgagaaggacgactccgagctgcccacaacctggtgaagcgggggatcaccaatctgtgtgtcatcggaggcgatggcagcctcactggggctgacacttttcgttcagagtggagtgacttattgaatgacctccagaaagatgggaagatcacagccgaggagcgtacaaagtccagctacctgaacatcgttttcctggttggctcaatcgacaatgacttctgtggcactgatatgaccattggtactgactctgccctgcaccgcattgtagagatcgtggacgccatcaccaccaccgctcagagccaccagaggacatttgtgttagaagtgatgggccgccactgtggatacctggcccttgtcacctctctgtcgtgtggggccgactgggttttcattcccgagtgtccgccagatgacgactgggaagaacacctttgtcgccgtctcagtgagacaagaacccgtggttctcgtctcaacatcatcattgttgctgagggtgcaatcgacaaaaacgggaagccaatcacctcagaagacatcaagaacctggtggtaaagcgtcttggatatgataccagggtcactgttctgggacatgtacagaggggtgggacaccatcagcctttgaccggatcctgggcagcaggatgggtgtggaagcagtgatggcacttttggaggggaccccagacaccccagcctgtgtggtgagcctctctggtaatacggctgtgcgcctgcccctcatggagtgtgtccaggtgaccaaagacgtgaccaaggctatggatgagaagagatttgatgaagccattaagctgagaggccggagcttcatgaacaactgggaggtatacaagcttctagctcatgtcagacccccagtctctaagggcgggttgcacacggtggctgtgatgaacgtgggggccccagctgctggaatgaatgctgcagttcgctctactgtgaggattggccttatccaaggcaaccgagtgctggtcgtgcatgatggctttgagggtctggccaaaggtcagattgaggaagctggctggagctatgttggaggctggactggtcaaggtggttccaaacttggtactaaaaggactctacccaagaagaacctggaacagatcagtgccaacataaccaagtataacatccagggcctggttatcattgggggctttgaggcttacacagggggcttggagctgatggagggcaggaagcagtttgatgagctctgcatcccatttgtggtcattcccgccacggtttccaataatgtcccagggtcagacttcagcatcggggctgacacagcactgaacaccatctgcacgacctgtgaccgaatcaagcagtctgcagcaggcaccaagcggcgagtgtttatcatcgagacgatgggtggttactgtggctatctggccaccatggcaggactggcggctggggctgatgctgcctacatttttgaggagcccttcaccatccgagatctccaggttaatgttgaacatctggtgcagaagatgaaaacaactgtgaagagaggcctggtgctgaggaatgagaagtgcaacgagaactacactactgatttcattttcaacctgtactctgaggaggggaagggcatcttcgacagcaggaagaacgtgcttggccacatgcagcagggtggaaacccaactccctttgacaggaattttgccaccaagatgggtgctaaggctacgaattggatgtctgggaaaatcaaagagagttaccgtaatggacggatctttgccaacactcccgactcaggttgtgttctggggatgcgtaagagggccctggtctttcagccagtgactgagctgaaggaccagacagattttgagcaccgaatccccaaagaacagtggtggctgaagctgaggccaatcctcaaaatcctggccaagtacgagattgatctggacacctctgaccacgcccacctggagcacatttccaggaagcggtctggagaagctgctgtctagaccactttggagtgaggggaaaatcacctgatcatggtcagctcacaccctggtagacctcagcccatggcttctcagtgttgtagcccagcccctacccttctaggtttccctgtactctgtacctgcaaccaggatcactgtggccaggtgttgggggaggggtggtgagtgcctctcctaggtagctgtccttccttgcaccctggcttcatctgtcacacaggctggatgtctctagtgctactgctagatttcagcttctcaagagtaaaagtgagctttatttatttctttgtgataacaaagagtcctaggtcctttccttgtaccacagtgaagtgtaactacactaataaaagccagctggccactgtga

SEQ ID NO: 1099 - DNA, 2977 bp, Rattus norvegicus
  Genbank Accession No. NM_031731
gaattcggcggatggaagccagctgtcccgagaagcagtgaactgtggcgtcatcccgagcagtgccttaccggtattgtgctgcttcacctgcctcgctcggcgttctcctcaggccccgccatggagcgacaggtccaacgacttcgccagacgttccggtccggccgatcgcggccgctgcgtttccgactgcagcagctcgaggccctccggaggatggtgcaagagcgagagaaggacatcttggcagccatcgcagcagacctgagcaaaagtgaactcaatgcatacagtcatgaagtcattaccatccttggggagattgacttcatgctggggaatcttcctgaattggcctctgctcggccagcgaagaagaacctgcttaccatgatggacgaggcctatgttcagccagagcctctgggagtcgtgctgattattggagcttggaactatccttttgttctgaccctgcagccactggtgggagccattgctgcaggaaatgctgccattgttaagccctcggaactcagtgaaaacacggctaagatcttggctgaactcctccctcagtatttagaccaggacctgtacatgattgttaatggcggcgttgaagaaaccacagagcttctgaggcagcggtttgatcacattctctacacaggaaacaccgcagttggaaaaattgtcatggaggctgctgccaagcacctgacccctgtgaccctggagctcgggggcaaaagcccatgctacattgacagagactgtgacctggacgttgcttgcagacggataacctggggaaagtacatgaattgtggtcagacctgtattgctcctgactatatcctgtgtgaagcctcctcccaggatcaaatcgtacagaagattaaggatacggtgaaggacttttatggggaaaatgtaaaagcttctcctgattatgaaaggatcatcaaccttcgtcactttaagaggataaaaagtttgcttgaaggacagaaaatagcttttggtggggagactgatgaagctacacgctacatagccccaaccatactcactgatgttgaccctaactccaaggtgatgcaagaagaaatttttggaccaattctcccaatagtgtctgtgaaaaatgtggaggaagccataaatttcataaatgatcgcgaaaagcccctggcactctacatattttctcacaacaataagctcatcaaacgggtgattgatgagacatccagtggtggagtcacaggcaatgatgtcatcatgcacttcactgttaattctttgccctttggaggtgtgggtgccagtggaatgggggcttatcatggcaaatacagtttcgataccttttctcatcagcgcccctgcttgttaaaagggttaaagggagagagtgttaacaaactcaggtaccctcccaacagcgagtccaaggtcagctggtcgaaattcttcctgctgaaacagttcaacaaaggaaggctgcagctgctgcttctcgtgtgcttggttgcggttgcagctgtgatcgtcaaggatcagctgtgatgacttccttgtagcctctactgaagtacccctcggccaaatggttaacacaccaatgcttttaaaattgtacccaaaccaggaaatgaaattcacaggtgaactgcagtcaaacctaagttgttgccacaaaccactgatgaaactcagtgcttcagccaaatcccagcatttgtcagccgtgcaggtgctgagagggtggagactgggaggggcgacacctagtccatggcagcgggatgtcagggagactcgacaactgctcccgcactctttgctccaggacatagctctcccacccggtgtcaacaccctccaggctttccagctgtcctctgattgctgaggttcctgttagggacccaggtactaaacctgggcgggtggatttgtcggcctcatccattgtggctcgagaccggccttcgggagtcggctctcagtctaaacatcctttctcattcatagtgtgtcacccgaagatgcttgtttgtgacattgtgacagtctgtcatgactgtcccggtgcctttgtgatgacttaaactacactgaggagcttgccaacttgtgaatgcccttcagagggtctggcagtcacagctgttccagagcccgagggacgaagattccggagcccggagtttgaggccaacctaggcaacataatgggaccctctcattattattcctccataacaatcccctcgagaccctcgatttgaatgttatataggtcttcaggataaatctgcttattttcacagcacaacacaaaaaaaatttacttttgaaatcttagagagattcctacagatcttagcatggagctgttcctgtagtgaaaggggggttattagacatgaggcttcagaactcatggggcagggttgttggagactaccgtgagctgagggggcacactgaagcgatgggatggccagaagcgcacctgagcaagcggggcagcattctctgtcagaccctaacatggctacacggggatgtggcagagagatctgtgccgttggctgccagcgctggttaggcctgaagctccaagctgcagaggtctcattgccttcccaggatccaaattaagactgcccactcaatgagaatgtcacttgcgtatgtacaaccatgtttgctgagtaacctgttccaccgttgaggctgtctgaagtgtattgtatgaggtatcaagaacgagtcattggcccatttggcaaatagttgcttatgtagcaattgtcatggactaatcataaaatattttgcacaaaatttcaatgttgaacttgcactcactgttgttaaattataaatcacagcttctagttaggccaaaatatttacatactctactaatcttcaaaataaatgtatcccggaattc

SEQ ID NO: 1100 - DNA, 1678 bp, Rattus norvegicus
  Genbank Accession No. NM_031738
ttacccaacctgcaccctctcactggctacagcactccctccgaccttgggattcccagacaccggccagcgttgctgcccttcggcttcctagccctgcgtaggcgcaggtgcaacctccctgcagtgggcctggtgcaataggactgcggacatcatggcgcacggaaacgcccctcgggacagctaccacctggtcgggatcagcttcttcattttgggtctgggcaccctcctcccctggaacttcttcattaccgccatcccgtacttccaggggcggttggcagggaccaacagcagcgctgagaccccgagcaccaaccacaccagtcccacagacaccttcaacttcaacaactgggtgacactgctgtcccagctgcctctactgctcttcacgctcctcaactccttcttgtatcagtgcatccctgagtcggtgcgtattctgggcagcctgctggccatactactgctctttgccctgacagcagcgctggtgaaggtggatttgagccccgggctgttcttttccatcaccatggcatccgtctggttcatcaattccttctgtgcagtgcttcaaggcagcctctttgggcagctgggtaccatgccttctacctacagcaccctcttcctcagtggccagggcctggctgggatcttcgctgcccttgctatgctcacgtccttagccagtggcgtggacccccagacctctgcccttgggtacttcatcacaccctgtgtgggcatcctcctctccatcatatgttacctcagtctgccccatctgaagtttgcccgttactacctgaccaagaagcctcaggccccagttcaggagctggagaccaaagctgagctcctcggagctgatgagaagaatgggattcctgtcagcccccagcaggcaggcccaactctggatcttgacccagagaaggagctggagctggggctggaggaaccacagaagccaggaaaaccttcggtctttgtcgtcttccggaagatctggctgacggcgctgtgccttgtgttggtcttcacagtcaccctgtcggtctttcctgctatcacagccatggtgaccaccagctccaatagccccgggaagtggagtcagttcttcaaccctatctgttgcttcctgctcttcaacgtcatggattggctgggccggagcctgacttcctacttcctgtggccagatgaggacagccagctgctgcccctgctggtgtgcctgcgcttcctgttcgtgcccctcttcatgctgtgtcatgtgccccagcgtgcccggctgcccatcatcttctggcaggatgcctacttcatcacattcatgctgctcttcgccatttccaacggctacttcgtgtctctcaccatgtgtctggcacccaggcaggtgctgccgcatgagagggaggtggccggagccctcatgaccttcttcctggccctgggactctcctgcggagcctctctctccttcctctttaaggctttactctgaggaccaccgcactccacagtcctccctcactgctgcttctggagctggacattcccggggaaggacctctgctataccgggtctcttggtctgtgggtgccaggagggggcagaaactaccttggctggtagccacattgcatatggtga

SEQ ID NO: 1101 - DNA, 5729 bp, Rattus norvegicus
  Genbank Accession No. NM_031740
agcctgcaggggtctcggggcgcacagggctgccgggattgtcctcgtgggtgtccgcagtccgagatcgccgcgtgtctgtcatctgtttccttcgtcctccgggccccggccgcgcgcatccgccgggtagtccggggtccgtgcggggggcggcggcgcctctccctcgggccgggcggcgggaatgcggttgccttggccggctgggcagcgggcgcggctgcaaacggaacccgggtgcactcgccgctggccgggacgccgccctggcctgctctcggctcccgaggccgccctgcgctctggggcccggcgcggaatgaggtgcaggccgcgcaccgccgacgccccctccgcggccccctggttcaacgcggccgcccgcgcctcgcgtgccccagcgcccacgttagagcctcgcactggcagcgctcgcggaggcacaggcctgcagagcgcacgccactcggcccgggtcccgatcgcggggactcgcctcttggacaccgccccaggtgcgggaccccgacacgctgcaagcgcgcgggccgcctccgcatcgcagagctcctctagcctggcccgtggctttggcctccacggagccggatctccctgcctccctccacatttctccgcatcctttcaacacccttcccgctgctctaccacctcccattcattgcatccatttctccttcccggctcggttcttcttcccataacctccccggccggaccccgctacccacccggtacattcatggaagtttagggcctggaccgtggctcggagtctggcctgagagcgcagcggagctgctggtagggcagaggaagatgtctgcgctcaagcggatgatgcgggtctccaatcgctccctgatcgccttcatcttcttcttctccctctccacgtcctgtctctatttcatctatgtggctccaggcatcgccaacacatacctctttatggtacaagctagaggcatcatgctgagagaaaatgtgaaaacaattggacacatgatcaggctgtataccaataaaaacactacgctcaatgggacagattatcccgaaggcaataatacaagtgactatcttgttcaaacaacaacgtatcttccgcagaacttcacgtattcaccgcacctcccctgtccagagaagctgccttatatgcggggattcctcagtgtcaacgtgagtgaaatcagctttgatgaagtccatcagctcttctccaaggactcggagattgagccgggaggccactggaggccccaggactgcaagcctagatggaaggtggcagttctcatccccttccgtaaccgccatgaacacctcccgatctttttcctgcacctgatcccgatgctccagaaacagaggctggaatttgccttttatgtcatcgaacagaccggcacacaaccgttcaatcgtgccatgctctttaacgtgggtttcaaagaggccatgaaggacagagcctgggactgtgtgatcttccacgacgtggatcatcttcctgagaacgatcggaactattacggatgcggggagatgccgcggcactttgcagcgaagctggacaagtacatgtacattcttccttataaggagttctttggtggggtgagtggcctgacagtggagcaatttaggaagatcaatggctttcccaatgccttctggggatggggaggagaggatgacgacctttggaacagagttcactactctggatacaatgtaacccggccagagggggacttgggaaaatatacatctattccccatcaccatcgaggggaagtacaatttttaggacggtataaattacttcgctattctaaggagcgtcagttcattgatggattgaacaatttattatacacacccaaaatactggttgacaggctgtatacaaatatatctgtaaacctcatgccggagttagctccagttgaagactattaaaaagaagtcattcccgtggtggggtagaccacagcactgaatcatgaacttggcttggaatgcactcaccgtggaagttagagattggtgtgtatctcagtgtcccagtctgtaaaaagaaccagcagtccttaatgtttacagcgtgggctccatctgtcacactccccactctcctccctgctgggagcacctcccatggcgagcactgtcgagatacaaacccattgcttgggattggaagtgaagaaaactccctacacagagaagattttttttatactgaaatctataatttaattcaagagaatgcttttatttccgttcaaacatattttgtacatatgtgatgtaaattaaatatgttcaaattgttggaaaataagatgtcataattttgcatgtaattggttatgccttcattggacttttatagacattttttttatttgcatggggggaaaaaactgtaaatttatgtcgccagacaaaggttaagccttgtgtgaaatgaagggactgtcagcgacggacaaagataataccgtaactgtttcgttgaactggtgttcagctttagccttcagcctcatgggaagaggcacagtcctctgagggctttgaaggaaggaaggaaggactcgaatagcttttcttcctgccaggattacctgttttgtttgtttgtttttttcacttgcttgcagtctcatcagatcttgccaagtcagcagccatattgtttatgcatactgcatgagtattaccaagaaaatcttcagagttgtaaagtgacatgctgtacaggacctcttcgtgttaaatgtctctatgtacctctgctgtgtcagggatcttgtgcctcaaaaaaaaaatgtccccaaggttgtgtttatacacggtctatatttttttcaatctcataatgaacagcattattatttccactttagaagaaccaaaagaaggtatcttcttttaaaaacattttttttaaagaatgaatttatggaaaatccagtagtgcttatacagatgaattatactattagatgagaaattagatgctctatttttatgaagataaatgcttagattaaaacagactttaactttaattctcaaacgtacatagttccctttcacatcagccagtcacttgaactgttttttttttctttttttccgctttcaagaaatctctggtgttattcaaatttttttttcactaccagtataatttaatgcccccccccccccccgtccccagtggagctgggaattgaatctagggcctgtagacttaccttaaaatcattattgtatgtgtggatgctgtgacttctgaactaggtctcacagcctaacgccaggtctgctcatcctcctcacttgggtgaggcttttgacaaccaaagaacaacaaagcccaaacagtgttctgaaaattatcaattctaaagattcttgaaaaatagcttgtattctcatgtaagatcttatctcccatatttaaacaaattgaaaacatcgcctatctgtcaagtgaaccctcccaaagagcaaagagtgagagaattctgaatgtggggaagtttgtccccttgtctgacgtgagagcttagcttgcagttgtccttgtctgtcacagttttaatgctgatggccacaagccaaagtaattagatccttacaccggagaagacagacaccctatctgttgtgacagcagtctttccaggttcttcttagacgtgcttctaaaatacttacctcccaacttttttggttactcaaagtagtggggggggggggaatcacaacctgtggaaatgaagatttttgtatgctatcagttattctctgtctcttgtggctaatgaggtgtttaattcgacggaatgacagtaaagtgtaatgttaatgttaaggctggtgagacaggactctgggtgtgtggtgagcccagccctggtccctcctcctggttctgtggaatgtggtaccacgtggattcttactgggggaaacacactttataaggtgacaggctatccacagtcagcaccttttgcattgatatatagttcacagctttaggaaaattcagaactggtgaactgccttactctcttagggtaagtctggcattaacatggctgcgggagtcggatgtatttctgctaaatcttcatgctgaatctgctgtgtcagcttgtgagaaccgccttttctaattcagacctggaattattttctttttctttttctttttttttttttttttttttggagctgaggactgaacccagggccttgagcttgctaggcaagagctctaccactgagctaaatcctcaaccccctggaattattttcagtagtgaatagtgatctctatatgtcaccacaaatgacagttttgccctgttaccataaccacagtgaatctcctccttctatattagcccaagcagacagtctgatagaatcaaatgcacttggtggctttgcactgtctgcccacatccgctgccttgccaacggtggtatttaaacgtggtttttgtttgcttttgcctgaacaagtcaaatcgagacagttgaaacttacctgagattaggaagaatgtcctctggtaacttacctgtcacttgtcttagactcggagccagtgtggccacagatgctgggaggccctcgtggcactggggaaatgatcgatgcctttgaactgaagaaagaaagcatgactgacaggccgaaagttcccacgtccactgtaacattctgtctgattttttaatgaagatgtcatttaattatttgccaaaactagggttttaatgaagtggcttccccagtcccctttttatagttattttctggtgtagacccttgaggtggctcagggtataaaggtgcctctcccaagcctgacaacctacgcttgatccctggggttcacactgtagaaggagaggactaccctggtacattgttctcagacttctgtatgtgtgcggctcgcgctcacacacacacacacacacacacacacacgcgcgcgcgcaaggcaaattaaaaggtatataaaagttaaatttctgttttataaaacggtgtttaataagaaaatatttataaaatttaagtacaaaattatctattaaaaattcctattcctgccagtcaatggtggagtttgcctttaatccaagctctctggaagcaaggcaggttctctgaattggaggccagcctggcctgtggagtgagttccaagacagctggggcgacacagagaaactgtctcaaaaacaaaaccaaatcaaaacaaaaactgctattccagttgatactgataaccattgtaaaagagagcagaaatatcatcaatacaatatcgtccctttgggactccctgggggggaagcagattgtatttgtgtcattgtatctgccctgtttctttataaataacactctagatttcttgccttgggtttgcagagttgttgagaagcaaactgtcgccgtgttttttggaaggtggaagtgtacttaagattatttattatgaaatggagtacttctatgtaagtgcgttgatgtaaacgctagtgatttctcgctttttttttttgtcttgttttgcttctcatggaaatgtttgtactttttttatcattgtcttttatgaaatacaatgttctaaagaaaaaaaaaaaaaaaa

SEQ ID NO: 1102 - DNA, 2169 bp, Rattus norvegicus
  Genbank Accession No. NM_031741
tgaggaggtgagccagctgcaggctacccttgcagagcaacgatggagaaagaggatcaagagaagacagggaagctgaccctggtccttgccctggcaactttcctagctgcctttggctcctccttccagtatgggtacaacgtggctgctgtcaactcgccctcagagttcatgcagcagttctacaatgacacctactacgacagaaacaaggagaacattgagtccttcaccctgacgctgctgtggtccctgactgtctccatgttcccctttggaggttttataggatctctcatggttggattcttggtgaataacttgggcagaaaaggggccttactgttcaacaacatattctccatcctgccggccatcttgatggggtgcagcaaaattgccaaatcctttgagataataattgcttccagacttctggttggaatatgtgcaggtatatcttccaacgtggtccccatgtacttaggggagctagcccccaaaaacctgcgaggggctcttggagtggttcctcagctcttcatcactgtgggcatccttgtggcccagctgtttggccttcggagtgtcttggcaagcgaggaaggctggccaatcctcctgggtctgactggagtccctgccggcctgcagctcctcttgctgcccttctttcctgagagcccccgctacctgctgattcagaagaaaaatgaatcagctgctgagaaagcccttcagacccttcgaggttggaaagatgtggacatggagatggaggaaatccggaaggaggatgaggctgagaaggcggcaggcttcatctctgtgtggaagctgttccgcatgcagtccctccgctggcaactcatctccacgatcgtcctcatgaccggccagcagctgtcaggagtgaacgcgatttactactacgctgaccagatctacctcagcgcaggggtgaaaagcaacgacgtccaatatgtgacggctgggactggggccgtcaacgtgttcatgaccatggtcacggtttttgtggtagagctttggggacgtcggaatcttctcctcatcggcttctccacctgcctcacagcttgcatagtgctgacggtcgcactggcactgcagaacaccatctcctggatgccctatgtcagcatcgtctgtgtcattgtctacgtcataggacacgccgtggggcccagtcccatccctgccctgttcatcaccgagatcttcctgcaatcctctcgaccatccgcctacatgatcggaggcagcgtccactggctctctaacttcatcgtgggcctcatcttcccgttcattcaagtgggccttggtccttacagcttcatcatctttgcgattatatgtctcctcacctccatctacatcttcatggtcgtcccagagaccaagggcaggacgtttgtcgagatcaaccagatttttgccaagaagaacaaggtatcggacgtatatccggagaaggaggaaaaggagcttaatgacctcccacctgctacccgggagcagtagcagagccaggccaccaggcagtatggccagtctgcatgggcctcctgtctagactttggttctgggttcttagtgtctgtgacactgggagggacacgagcctggcggggaatggcagccctccactcagtggggacacctgacgggctttcgtgcttccgtgctgtccctaaccatagaggccagtcacgggctcttggtcacacacaaagccatacctggcctttgctgggttgactgtggcgagggtcttgtaacattgcttttctaacaaaaacagttgccgagagacaagacgtgacggtcctattttttttttaactttttttttctattcttttttttttttttttttcggagctggggattgaacccagggccttgcgcttgctaggcaagcgctctaccactgagccaaatcccttgtgtggctcctcccatgggcgtggagagaccactggcatctgctggtgattgatgtggtcctctttttctgacccagccatgtcacaaagctgaggaacaggccacttggggagacacacggagcgtgaattatcaactgtcaacgacagtattctgtttagccaataaaacagatctgatcacttcttaaaa

SEQ ID NO: 1103 - DNA, 4245 bp, Rattus norvegicus
  Genbank Accession No. NM_031757
ctcggcggctccgcagcggctgcagcgggaggacccggccggagccgccgccgccgccgccgccgccatcgcagccgggcggccgggcccccgccgccgggatgccaaggagccggggcggccgcgctgcgccgggccaggccgcgcgctggagcggctggcgggccccggggcggctgctgccgctgctgcccgcgctctgctgcctcgcggcggcggcgggggccgggaagccggccggggcggacgcgcccttcgccgggcagaactggttaaaatcctatggctatctgcttccctatgagtcgcgggcgtctgcgttgcattcagggaaggccttgcagtcagcagtctccactatgcaacagttttacgggatcccagtcaccggtgtgttggaccagacgacaatcgagtggatgaagaaacctcgatgtggcgttcctgatcatccccatttgagcaggaggaggagaaataaacgctatgccctaactggacagaagtggaggcagaaacatatcacctacagcattcacaattataccccaaaggtgggtgagctggacacacggaaggctattcgtcaggctttcgatgtgtggcagaaagtgaccccgttgacctttgaagaggtgccataccatgagatcaaaagtgaccggaaggaggcagacatcatgatcttctttgcttctggtttccatggtgacagctctccttttgatggggaagggggcttcctagcccatgcctactttcctggcccaggaatcggaggagacactcactttgattcagatgagccctggacactaggaaatgccaaccatgatggcaatgacctcttcctggtggccgtgcatgaactgggccatgccctggggctggaacactctaatgaccccagtgctatcatggcacccttctatcaatacatggagacgcacaacttcaagctgccccaggatgatctccagggcatccagaagatttacggacccccagctgagcctctggagcccacaagaccccttcctacactcccggtccgcaggatccattcaccgtctgagagaaaacatgagcggcagcccaggcctcctcggccacctctgggggaccggccatccactccaggtgccaagcccaacatctgcgatggcaacttcaacacagtggccctcttccgaggggagatgtttgtgtttaaggatcgctggttctggcgtctgcgcaataatcgggtacaggagggctaccccatgcagattgaacaattctggaagggcctgcccgcccgcatagacgcagcctatgaaagagcggacggaagattcgtcttcttcaaaggtgacaagtactgggtattcaaagaagtgacggtggagcctgggtacccccacagcttgggggagctgggaagctgcctgccccgtgaaggaattgacacagctctgcgctgggaacctgtgggcaaaacctactttttcaaaggcgaacggtactggcgttacagcgaggagcggcgagccacagaccctggctaccccaagcccatcaccgtgtggaagggcatcccgcaggctccacaaggggccttcatcagcaaggaaggatattacacctacttctacaaaggtcgggactactggaagtttgacaaccagaaactgagtgtggagccaggctacccacgcaacatcctgcgtgactggatgggctgcaagcagaaggaggtagagcggcggaaggagcgcaggttgccccaggatgatgtggacatcatggtgaccatcgatgacgtgccaggctctgtgaatgctgtggctgtggtcgtcccctgcacactgtccctgtgcctcctggtgctgctttacactatcttccagttcaagaacaagacgggtccccaacccgtcacctactataagcggccagtccaggagtgggtatgagcagcccagagccctctctgtctacccagtctggccagccaggcccttcctcaccagggtctgaggggcagctctagccactgcccactggggccagcagggccctaggccaggttcgtgtgtagctgaagtggtgggtacattggtctaggctgagtgtggggcagggagtgatggtggctatgccccaggttgggtagctggtacccagctgccagccttctgtcctgggtagacccctctctactcaagggaataggccaggccctgtcaggaggcaaggatcatgccaggaggtgcccctgaggtctctgcatcctgtggtgtctgcaagatgccgcagttccagtcccggctgggacccagccctctgaggcaagccagcactagctctcacccccaccccaagatgccaccaatcccagtcccctctgccaacacctgctggtcagatgtcccctcacccctaccctactatcctccaaggctgcagtgcccctgatgccaacacagtgggcaaaggcctgggtttcccctgctagctaacagcagattcctcaggaaacctgctccacctgtcaggtctcctctgagactcagaatttagggtcacatgctgcaggcaaggctgtggcccgctggatctcacaaggacccagctgtcatgtcgtgaatatttaaatgtcctgtcactactgtttaaagtcccattttgcaaaggctacttgaggctttaggtcagctagaggtgactgtcttggtgatgaggccagagtggtggcccttccccaggcactaaggactatggtgctgcaagggccactcgggcatcctgttcaggagactcaacagccagggcaggagctgaccctggttctgggggcggatccaagtttgtgactattctctactccccttccttaatgttgtcccctgccttgctccagcctgtcctctgtggcctgggggctcagtctgactataggtaaagcagagatgattctagagccaccattgtcataaggaccagggcaatctttaaagtactccatccacatccccatctgccctgaggcaactcagtttcagactggaggcatgtttgtgctccaatcttgaccctggaagcccagctcactgggcccatcttcctgcactgctcttacgaaaagggtactcacagccggtagcagccccaggctttgggacttcccctcgctccctaccccaacctacctttcttttgttttaacctgaggcccttcacatctgacagaatccctaagccttggcttgacttgctccaaaaccactgggtgcagtgttgttcgctggctctctgctaagcccaacagtggtaggaggcggccatcagggtgctagtgggtcacagataccaactctgacctctgagcctgcatgggctttgcccctgccctgtggtctctgggatttgggtcagctcgtcctgtagcagatagggactctcgctgggttgggagctaagtgaaatctcttgtcccagaagcacctatgtgggtccatcgtgtcccatctcaccatcgtgttctttctcattttggccaagggcaggctccccagggcaggcggggaacaactgcagagatttcgtgattcataggtttgtagtgttttatactttgcaaagcactttattagctcacacctgtccactcacacggaactcctgtaggctctgagaggctgagggtaattctcctcttaccctcagatgaagcacaaggaggtcttatctgcccctgccatccagtgaccctggctgggtctgtgtccccatctgtgggtccttccagggcctgagatcaatgtctcttctagtcctctcttctgggcctccctcccctagtttcctggtccctctcctcagcttggtgctctcacttcttgaaagctctaggccccgcaggctccctgttgactcctggcattccaaggccagctgagaaagagcaggaggtggaagcaggcagcccaggctgcagatgtgaggggtgcagggccgggcccagagagggctcagcctagaggcttccaatcttggattcttctgcctgtggtcatctgtctgtccatcagcccaggtcagagcagtcagaggggcaaagtactggagcccccccagagctcagcttcccctcagcctgggtgacatcacagcatttcagtgtcggtcacattttaaactgatcagcctttgtacaatgttttttaaatcatttctaaataaaacagaaatacagtgaaa

SEQ ID NO: 1104 - DNA, 1233 bp, Rattus norvegicus
  Genbank Accession No. NM_031763
atggtgctgtcccagagacaacgagatgaactaaatcgagctatagcagattatcttcgttcaaatggctatgaagaggcatattccgtttttaaaaaggaagctgaactagatatgaatgaagaattagataagaagtatgctggtcttttggaaaaaaaatggacatctgttattagattacaaaaaaaggtaatggaattagaatcaaaactaaatgaagcaaaagaagaatttacgtcaggtggtcctcttggtcagaaacgagacccaaaagaatggattccccgtccacctgagaaatatgcattgagtggtcataggagtccagttactcgagtcattttccatcctgtgttcagtgttatggtctctgcttcagaggatgctacaattaaggtgtgggattatgagactggagattttgagcgaactctcaaggggcatacagactctgtacaggacatttcctttgaccacagtggcaagcttctggcttcctgttctgcagatatgacgattaaattatgggattttcagggttttgaatgcatcagaaccatgcacggccacgaccacaatgtctcttcagtagccatcatgcctaatggagatcatatagtgtctgcctcaagggataaaactataaaaatgtgggaagtgcaaactggctactgtgtgaagacattcacaggacacagagaatgggtacgtatggtgcggccaaatcaggacggcactctgatagccagctgttccaatgaccagactgtgcgtgtatgggttgtagcaacaaaggaatgcaaagctgagctccgagaacacgaacatgtggtagaatgcatttcctgggctccagaaagttcatattcttccatctctgaagcaacaggatctgagactaaaaaaagtggcaagcctggacccttcttgctatctggttccagagacaaaactattaagatgtgggacgtcagtactggcatgtgccttatgactctggtgggtcatgataattgggtacgtggagttctgttccattctggggggaagtttattttgagttgtgctgatgacaagaccctccgtgtatgggattacaagaacaagcgatgcatgaagaccctcaatgcgcatgaacactttgttacctccttggatttccataagacggcaccctatgtggttactggcagtgtagatcaaacagtaaaggtgtgggagtgccgttga

SEQ ID NO: 1105 - DNA, 1446 bp, Rattus norvegicus
  Genbank Accession No. NM_031775
ttccggcaggaaacgggacctggagagcggaggcctcaggacgagcgcggacacccggagctcgtgggcagcctgaaaagtggggagaagtggcagaccagagctcggggcacaggcctgcaggagcccagctcaagacccctaaccaaggccagaccaaggccagacctgggcaggcacctccatcacagcgccttctgcagtcagaacttgttgctgtccacaggggaaagtaaaacatgacggagacagatggcttctacagaagtagggaagtgttggatccagccgagcagtacaagatggaccacaagaggagaggaactgccctaatcttcaatcacgagaggttcttctggcacctagcactcccagagaggcggggcaccaacgcagacagggacaacccgactcgaaggttctcagagctaggatttgaagtgaaatgctttaacgacctccgggcagaagaactactgctcaagattcacgaggtgtcgacttccagccacgtagatgccgattgcttcctgtgtgtcttcctgagccacggggaaggcaaccacatttacgcatacgatgccaaaattgaaattcagaccttgactggcttgttcaaaggagacaagtgtcagagcctggttggaaaacccaagatattcatcatccaggcctgtcggggcagccagcatgacgtgcccttggttcctctggacgtggtggatcatcagacagacaagctggacgacaacgtgacccaggtggatgctgcctcggtgtacactctgcctgcgggggcggacttcctcatgtgttactctgttgcagaagggtattactctcaccgagagactgtgaacggctcctggtacattcaggatttgtccgagatgctggccaggcacggcagttccctggagttcaccgagctgctcacgctggtgaacaggaaggtctctcagcgccgtgtggatttctgcaaagacccaggtgcaattggcaagaagcaggttccctgctttgcctcaatgctgaccaaaaagctgcatttctgtcccaaacctagtaagtagggccgtccgacttgctacaaatgtttcacacacatttcccttctacacagaggccagctggccaaagactccgcccaccaacggacactgtttgaatttttaaggtgctacagaaaagtaatgttttgcctttgttattattttcaatcatgttggggatggggaaggctaaagaaatctaggaaattactgtgcgcaaatgcccaatacatttattatgtttctggtaaatggcaagattactaagaataccaactactttgccttaccttttgtgacactatttatataggctcattgtataatgtttttaaagatctttgaaactcaagaatgagatcgttttctcctaataaaaatgtctaaaacccgg

SEQ ID NO: 1106 - DNA, 1568 bp, Rattus norvegicus
  Genbank Accession No. NM_031776
aagagccagcagctccccgctctgcagccacagggaccgaccgctctgcgcccgcccggtgcaccctctttggtcagtgaacttgcgctgccccgctgctgccatgtgtgcggctcggaggcgcgagctggcgctcatcttccgagggactttcgtccactccacctggacctgccccatggaggtgcttcgcgatcaccttcttggcgtgagcgacagcggcaaaatagtgtttctagaagaatcatctcagcaagaaaagctggccaaagaatggtgcttcaaaccgtgtgagatcagagagctgagccaccatgagttcttcatgccaggccttgttgatacacacatccatgcccctcagtatgcctttgctggaagcaacgtcgacctgccacttttggattggctgaacaagtatacatttcctacagaaaaaaggttccagagcaccgatgtggctgaagaagtctacactagagtcgttaggagaacactaaagaacggcaccaccacggcatgctactttggaacaattcacactgactcatccctgatccttgcggaaattacagataaatttgggcagcgagcatttgtgggcaaagtatgcatggatttaaataacactgttccagaatacaaggagaccaccgaggagtcagtcaaggagacagagagatttgtgtcagaaatgcttcaaaagaattattcaagggtgaaacccatagtgaccccgcgattttctctttcttgcacggagactctgatgagtgaacttggcaacatcgccaagactcatgatctgtacatccagagccatataagtgaaaatcgtgaagaaattgaagctgtgaaaagcttataccctggctacaaaaactacacagatgtctatgataaaaacaatcttctgacaaacaaaacagtgatggctcatggctgctacctttctgaagaagagctgaacgtcttcagtgaacgaggagcatccattgcacattgtcccaactctaatctgtcgctgagcagtggcttactgaacgtgctcgatgtcctgaagcataaagtgaagatagggcttgggacagatgtggctggtggttactcctattccatgcttgacgccatccgaagagcagtgatggtttccaacgtcctcttaattaataaggtgaatgagaaaagcctcaccctcaaagaagtcttcagactagccactcttggaggaagccaagccctggggcttgatcgtgaaattggaaactttgaggtcggcaaggattttgatgccctcttgatcaaccccagagcatcggactctcccattgatctgttttgtggggatttcgttggtgatatttctgaggctgttatccagaagttcctctatctaggagatgaccgaaacattgaggaggtttatgtgggtggaaagcaggtcgttccattctccagctccgtgtaaggcccttggacatccatgacgctctcctgggaggacatgagtctgctatcttccttgtacccagggaccgatcagaaagtatattcaaaaaaaaaaaaaa

SEQ ID NO: 1107 - DNA, 1057 bp, Rattus norvegicus
  Genbank Accession No. NM_031811
atgtcggggtccccggtaaagcgccagaggatggagtccgccttggaccagctcaagcagttcaccaccgtggtggctgacacgggtgatttcaacgccatcgatgagtacaagccccaggatgccaccaccaacccatccctgatcctggctgcagcacagatgcctgcctaccaagagctggtggaggaggccattgcctacggcaagaagctgggtgggccacaagaggagcagattaaaaatgccattgataaactttttgtgctgtttggggcagaaatactaaagaagattctaggccgtgtatccacagaagtcgatgcaaggctttcctttgataaggatgccatggtggcccgagccaggcgcatcatagagctttacaaagaagctgggatcagcaaggacagaattctcatcaagttatcatcaacctgggagggaatccaggccggaaaggagctggaggagcagcatggcatccactgtaacatgacactgcttttctccttcgcccaggccgtggcctgcgctgaagcgggcgtgacgctcatctctccctttgtggggcgcatccttgactggcatgtggcaaacacagacaagaaatcctacgaaccccaggaggaccctggggtgaagagtgtcacaaaaatctacaactactacaaaaagtttggctacaagaccattgtcatgggtgcttccttccgtaacacgggtgagatcaaagcgctggcaggctgtgatttcctcaccatctcacccaagcttctgggggagctgctcaaggacagcagcaagctggcacccacgctttccgtcaaagcagcccagaccagtgacttggagaagatacatctggacgagaaggccttccgttggctgcacaatgaggaccaaatggctgtggagaagctctctgatgggatccgcaagtttgctgctgatgccataaagttggagcggatgctcacagaacgaatgttcagcgctgagaatgggaaatagtgcagcacctgagactggaccgcagtcctgcaccgaggctgac

SEQ ID NO: 1108 - DNA, 1947 bp, Rattus norvegicus
  Genbank Accession No. NM_031816
gggctagaggcgcgggttgaaaagtctcgttccaagtttggagagagggagagagaggagagcgtctcagacctcgctacccgcaagcggggaggaggcagaagagaagatcgcggcgtctggggagcacccagacagccagaccgagctcaggctttccgagctaggagtgcgtgacgtgcctgggagaggcaggagcgcctgcgatcgggctgctcttgactagcgagagaagtccgaggcggcaaaggggggcgaacgacccgacgcaagatggcgagtaaagagatgtttgaagatactgtggaggagcgtgtcatcaacgaagaatataaaatctggaagaagaatacaccgtttctgtatgacctggttatgacccatgctcttcagtggcccagtcttaccgttcagtggcttcctgaagtgactaaaccagaaggaaaggattatgcccttcattggctagtgctgggtacccatacatctgatgagcagaatcatctggtggttgctcgagttcatattcccaatgatgatgcacagtttgatgcttcccattgtgacagtgacaagggagaatttggtggctttggttctgtaacaggaaaaattgaatgtgaaattaaaattaatcatgaaggagaagtaaatcgcgctcgttatatgccacagaacccacacatcattgccacaaaaacaccatcttctgatgttttggtttttgactatacaaaacaccctgcaaaaccagatccaagtggagagtgtaatcctgatcttagattaagaggtcaccaaaaggaaggctatggtctctcctggaattctaatttgagtggacatctcctgagtgcatctgatgaccatactgtctgcctctgggatataaatgcaggaccaaaggaaggcaaaattgtggatgctaaagcaatctttactggccactcagctgttgtagaggatgtggcctggcatctgctgcatgagtccttgtttggatctgttgctgatgatcagaaacttatgatatgggacaccagatccaatactacttctaagcccagccatttggtggatgcacacactgcggaggtcaactgcctctcattcaatccctacagcgagtttattctggcaactggctctgcagataagactgtagctttatgggacctgcgtaatctgaaactaaaactccacacctttgaatcccataaggatgaaatttttcaggtccactggtctccacataatgaaactattctggcttcaagtggtactgatcgccgcctgaatgtgtgggatttaagtaaaattggagaagaacaatcagcagaagatgcagaggatgggcctccagagctcctgtttattcatggaggacacactgccaagatttctgacttcagttggaaccccaatgaaccttgggtcatttgctctgtgtctgaagataacatcatgcagatatggcaaatggctgaaaatatttacaatgatgaagagtcagatgtcacgacatcggaactggaggggcaaggatcttaaacccaaagtatgagttgtttctattgaatgtattgctacacgaatgcttgatttgtcaagcgccaaaaaggcattgtatagtaggaaatgtaagtgggatggcttctggcattctttaccctctgattctagcactttcaagtgagctgttgcgtactgtatcatattgtagctattaggggaacaaaaaggaatgttgcttaagaatggacatcattgttttaaacacacattgctgggtattgcctttgattcaactgtcattttctcaaacttttaagtgcttgctcaagttcccaaatatgcgaggataacttttacactttttccttccaacacttcttgattggctttgcagaaataaagtttttaaaaaaaaaaaaaaaaaaaaaaaaa

SEQ ID NO: 1109 - DNA, 948 bp, Rattus norvegicus
  Genbank Accession No. NM_031832
aacagctagcggagcggcaggaggagcactaaccaggaaaatggcagacggcttctcacttaatgatgccttagctggctctggaaacccaaaccctcgaggatggcctggtgcatgggggaaccagcctggggcaggaggctacccaggggcctcctatcctggggcctacccaggacaggctcctccagggggttatcctggacaggctcctcctagtgcctatccgggcccaactggccctagtgcttatcctggcccaactgcccctggagcttatcctggcccaactgcccccggagccttcccagggcaacctgggggacctggagcctaccccagtgctcctggggcctaccccagtgctcctggggcctatcctgctactggcccctttggtgccccgactggaccactgacagtgccctacgatatgcccttgcctggaggagtcatgcctcgcatgctgatcacaatcataggcacagtgaagcccaacgcaaacagtatcactctgaatttcaagaaagggaacgacatcgccttccactttaacccccgcttcaatgagaacaacagaagagtcatcgtgtgcaacacgaagcaggacaataactggggaagggaagaaagacagtcagctttcccctttgagagcggcaaaccattcaaaatacaggtcctggttgaagccgaccacttcaaggttgcggtcaatgatgttcatctgttgcagtataaccatcggatgaagaacctcagggaaatcagccaactggggatcattggtgacataaccctcaccagcgcttcccacgccatgatctaagccagaaggggtgggccggcaccagaactgccctgtgtgttatgagcgggaaactttgcatttctctctccttatacttcttgtaagacatccatttaataaagtctcgtgctgagaga

SEQ ID NO: 1110 - DNA, 1227 bp, Rattus norvegicus
  Genbank Accession No. NM_031834
ggaattcgcaacgcctacacaaagatccctatcactgagcacccggaggcaaggctcagaaccccaggatcagcaacatggagttctcccgtccaccgctagtgcatgtgaagggtatcccactcatcaaatactttgcagagacaattgggccattgcagaacttcacagcctggcctgatgacttgctgatcagcacatacccaaagtctggtactacctggatgagtgagatcctggatatgatctatcagggtggcaagctagagaagtgtggccgcgcccccatctatgcccgggtacccttccttgagttcaaatgtccaggggttccctcaggtcttgaaactttggaagagacaccagccccacggctccttaagacacatctgcccctgtccttgctccctcagagtctgctggatcagaaggtcaaggtgatctacattgcccgaaatgcaaaggatgtggttgtctcctattataacttctacaacatggccaagctgcaccctgatccaggcacctgggacagcttcttggagaacttcatggatggggaagtgtcctatgggtcgtggtaccagcacgtgaaggagtggtgggagctgagacacactcaccctgttctctatctcttctatgaagacataaaggagaaccccaaaagggagatcaagaagattctagagtttttggggcgctctctacccgaggagactgtggattccattgttcaccacacatctttcaagaaaatgaaagagaactgcatgactaactacacaaccatccccactgagattatggaccacaatgtttctcccttcatgaggaaaggtactactggggactggaaaaataccttcactgtagcccagaatgagcgctttgatgcccactatgctaagacaatgacagattgtgacttcaagtttcgttgtgaactatgagtggattatggctatactgggaaccaaggcaaactgacacagcccatcatgatctcaagtaaaatgtgatgtgttcaatctacttgttgtatgcctagaggaaatctgagctaagagaataggattggggatgtggctgaggcagagggttttatcaacgcatgtcaggaaagcaatcagtcccaacacctaaaaagaacctaaagtacaaacatgcaaaaaatagtaagataaactatattttacctgaaagaataaatgccactgggaaatg

SEQ ID NO: 1111 - DNA, 1271 bp, Rattus norvegicus
  Genbank Accession No. NM_031840
ttatatttgggttctgcctactgagccgggagtctgggaactacaactcccagagtgctgagcggatgcacgctctgcttttaggtgtaagccgcaaacatcttggaccccgggagaatccgcgttgaagcacagagcatttagctcctctgtcagaatgaatggggaccagaaactggatgttcataaccaagaaaagcagaatttcatccagcacttctcccagattgtcaaggtgctgactgaggatgaactgggacacccagagaagggagatgctattacccggatcaaagaggtcctggagtacaacactgtaggaggcaagtacaatcggggtctgacggtggtacagaccttccaggaactggtggaaccaaggaaacaggatgctgagagcctacagcgggccctgacggtgggctggtgtgtagaactgctccaggctttcttcctcgtgttagatgacatcatggactcttcccacactcgccgggggcagatctgctggtatcagaagccgggcataggcttggatgccatcaacgatgctctgcttctggaagccgctatctaccgcctgcttaagttctactgcagggagcagccctactacctcaacctgctggagctctttctacagagttcctatcagactgagatcgggcagactctcgacctcatcacagcaccccagggccaagtggatcttggtagatacactgaaaagaggtacaaatctatcgtcaagtacaagacagctttctactctttctacctgcctatcgcggctgccatgtacatggctggaattgatggggagaaggaacacgctaatgccctgaagatcctgctggagatgggcgagttcttccagatccaggacgactaccttgatctctttggagaccccagtgtgaccggaaaggtcggcactgacatccaggacaacaaatgcagctggctggtggttcagtgtctgctacgagccactcctcagcagcgccagatcttagaggagaattatgggcagaaggacccagaaaaagtggcgcgggtgaaagcactgtacgaggagctggatctgcggagtgtgttcttcaagtacgaggaagacagttacaaccgcctcaagagtctcatagagcagtgctccgcgcccctgcccccatccatcttcctggaactagcaaacaagatctacaagcggagaaagtaacctcgaattgtagaggctgcgagggaggggtctcaataaattattgttcaac

SEQ ID NO: 1112 - DNA, 1342 bp, Rattus norvegicus
  Genbank Accession No. NM_031855
gcagccagacgccaggctggatgaaatgaagaaggcaatggcaggcagtggtgccagcctctgaggtgtcgagctgctacctcccaccgctcatctctcacacaatgccatcaaacccctgcaagccacacttcttgccagccacctggcacccgaatctcagggcctcctgcatgctgtttcccttggagaggctgaagagacagagtctagcaggaatcccctccgcttgcgggtaggaagcttggggagcagcctcatggaagagaagcagatcctgtgcgtggggctggtggtgctggacatcatcaatgtggtggacaaatacccagaggaagacacggatcgcaggtgcctatcccagagatggcagcgtggaggcaacgcgtccaactcctgcactgtgctttccttgctcggagcccgctgtgccttcatgggctcgctggcccatggccatgttgccgacttcctggtggccgacttcaggcggaggggtgtggatgtgtctcaagtggcctggcagagccagggagataccccttgctcctgctgcatcgtcaacaactccaatggctcccgtaccattattctctacgacacgaacctgccagatgtgtctgctaaggactttgagaaggtcgatctgacccggttcaagtggatccacattgagggccggaatgcatcggaacaggtaaagatgctacagcggatagaacagtacaatgccacgcagcctctgcagcagaaggtccgggtgtccgtggagatagagaagccccgagaggaactcttccagctgttcggctatggagaggtggtgtttgtcagcaaagatgtggccaagcacctggggttccggtcagcaggggaggccctgaagggcttgtacagtcgtgtgaagaaaggggctacgctcatctgtgcctgggctgaggagggagccgatgccctgggccccgacggccagctgctccactcagatgccttcccaccaccccgagtagtagacactctcggggctggagacaccttcaatgcctctgtcatcttcagcctctccaagggaaacagcatgcaggaggccctgagattcgggtgccaggtggctggcaagaagtgtggcttgcaggggtttgatggcattgtgtgagagatgagcggtgggaggtagcagctcgacacctcagaggctggcaccactgcctgccattgccttcttcatttcatccagcctggcgtctggctgcccagttccctgggccagtgtaggctgtggaacgggtctttctgtctcttctctgcagacacctggagcaaataaatcttcccctgagcc

SEQ ID NO: 1113 - DNA, 3513 bp, Rattus norvegicus
  Genbank Accession No. NM_031969
gtgcagccaccctcgcctgcctcgctcttccttccttcgctcgcaccatggctgatcagctgactgaagaacagattgctgaattcaaggaagctttctccctatttgataaagatggggacggcaccatcacaacaaaggagctggggactgtcatgcggtcactgggtcagaacccaacagaggctgaactgcaggatatgatcaacgaggtggatgccgacgggaatggcaccattgacttcccagagttcttgactatgatggctagaaaaatgaaagacacagatagcgaagaagaaatccgtgaggcattccgagtctttgacaaggatggcaatggctacatcagtgcggcagaactgcgccacgtcatgacaaacctcggggaaaagctaacagatgaagaagtagacgaaatgatcagagaagcagatattgatggagacggacaggtcaactatgaagaattcgtacagatgatgactgcaaaatgaagacctactttcaactactttccccctctagaagaatcaaattgaaatcttttacttacctcttacaaaaaaaaaaaagaaaaaagaaaaaagttcatttcttcattctgtttgtatctagcaaaactgaatgtcaaaagtaccttctgtccacacacaaaatctgcatgtattggttggtggtcctgccccctaaagatcaagccccctacatgagttttacagtataaatactcgtactaccttataaggaagcacttagtggactccttcaagttccatttgctaatgattaacacactgtctgggctggccagtttctcatgcatgcagcttggtgattgagcacagtcaggcctttgtattaaaactgaaaaatggaaaaaacaaattcaaactctcagatggcttctagttcaatctgttcagataaatgtcagcagccagtttaccgcaaacaaacatttaaaattggtttacctcaggatgatgtgcaggaaacgggtgaaggctaaactttgagacacagccctagatgtaggacagtcctcttcaagtgccccaatcccatggtgacagtgacaccctggtggcgagcccgagtgtgatggttcaccgctgtgcacattgcattggagtgaagtgaacaaggctgtcaccaaatcacacacgttttaataagaaatgtttactaagggagcatctttggactctctgttttaaaaccttgtgaaccatgactcggagccagcagagtaggctgtgtctgtggacttgagcacaccatcaacattgctgttcaggaaattataatttacgtccattccaagttgtaaatgctagtcttttattttttttttccaataaaaagaccattaacttaaaagtggtgttaaatggtttgtaaagctgagcttggaagggggacaaggccgttggaggggaggtcagcggacatagaaacacccaacgtccagtacaagctggatttcccgcccaggttctctagcatcaacccctgaaaccagacagattctttgtcatctacgaccatgtaagtctagttattcaaatctgcgcgcatgcgcaaatcatggtgaattgatacttggagtagagccctagtgaaggaaggcctcaagcattcagtaaggatgtcttggctgtgctgctgctgacctgttgaagtacatgaggccatctgtgcaggagacatgatttagtgtgtgtgtaatcctatactcactgtgtatggtgaagcaggccagtcaaagacactacctttgattcagtttaatttatggttatacttaactttagccttttttattatttaagttcactgctttttctccccctaagtagagttaatgcttaacactgtcttgaaagcaaaacaatatcccagaatgaattttgtgtcttaattacgaacctgtaaccaaaacgtacatgtgctggtactggtcccttagcccaaggcactgggctatttaaaaagtcccccttaagaagtgtgttgcatttaaaacaagggccttgtacatttttcagggtgttaactggctgtatctgattaataaggagtgttggcttccaaattcgggggtggcagggagctggcaggcttgtagcaaggcaatgagaagcccttggcaaccacacgggtgcactcggggtaacctacagacccctggttgctccttctcctgctccctgtctttctggcgttttgtagctccttagaattttttttctttctgccaggaggataggtcagagcagtagagaggaagacattgcctgagcgcttctgctcatctttggactgggtggttggcagacaggtcgatgggtggtaaattgacttcagtatcggactcagtaggtattcccttttggtagagaggactgagggctccaggtgtgaagtgaatggccgtggatatgttgtgtaagaggattaagtcgcccagtcgatgacccagtctcaggcttgtggtctgttacctcttggtagtttcaaagggggtcggaggtggctttttaaaaacaatttaccccctatctttaaccatttaccaagtctgtagaagctgggtagacaatattttagcagctccgtagcctgtcctaaaaggttaccttctaaacaggattcttgtgtggccagggatcctgcatgggaactggaaacccctaacccccggggggtgggaagcaggagtttggaactgtaggaggcagagtccccccacctcctcagccttctggcatccaggggcacaagcagcccagggcttggtgttggcagtctgagttcgtgaggtagaaagagtggggtgtcaaggcagtacccctgaagttggatagtactttcctgtaaactgtccctcacttataactactctataaatatatgcatatatttatataaatatatatatataagtgactggttagctggcatcctgctttagcctgagacttgccctaagaaactgctgagcccttggtaaacgtctacacagtaagtttttctgtctgttggggggagctgttgaacaaggcagacatcttgatagttcagatgggctttaatgtactgttgccagggaaggctttttctggttttttgacaaatttttagcacacttcaattggtgtctcgagcaactttaacacattgaagatgaggtattgtacatatttttatattctctttataagtgcatgtctccaacttgtaaccaatattgtacggaatggctgtccagtaggcctagtgtttctgtcacacgagagggatagcatgtaccattcacccctcagcatcctgggagcttcttcttgaatgaagactgtaaatttggtcaagtcaactcttagttcggtttccttaccatttgaatgattgactgtgtgtcctgcgtgtatttctcttttggcagcgaccagagttacactgatgtgtctcaaccgacccactcggctggcaaccacctatttattttct

SEQ ID NO: 1114 - DNA, 787 bp, Rattus norvegicus
  Genbank Accession No. NM_031970
gcacttctcggatcctcagcccagtgcttctagatcctcagccctgaccagctcagccaagaccatgaccgagcgccgcgtgcccttctcgctactgcggagccccagctgggagccgttccgggactggtaccctgcccacagccgcctcttcgatcaagctttcggggtgcctcggtttcccgatgagtggtctcagtggttcagctccgctggttggcccggctatgtgcgccctctgcccgccgcgaccgccgagggccccgcagcagtgaccctggcccggccgttcagccgggcgctcaaccggcaactcagcagcggtgtgtcagagatccgacagacggccgatcgctggcgcgtgtccctggacgtcaaccacttcgctcctgaggagctcacagtgaagaccaaggaaggcgtggtggagatcactggcaagcacgaagaaaggcaggatgaacatggctacatctctcggtgcttcacccggaaatacacgctccctccaggtgtggaccccaccttggtgtcctcttccctgtcccctgagggcacactcacggtggaggctccgctgcccaaagcagtcacacaatcagcggagatcaccattccggtcactttcgaggcccgtgcccaaattggaggcccagagtcggaacagtctggagccaagtagaagccttcagcttgctacccatccccagtagccgtcaccagccctccctctctgtcaatctgaatgctcttttgatacatgtactttctgttttactcaaataaa

SEQ ID NO: 1115 - DNA, 2455 bp, Rattus norvegicus
  Genbank Accession No. NM_031971
agagaagcagagaagcagagcaagcggcgcgttcccgaacctcgggcaagaccagcctctcccagagcatccccaccgcgaacgcacccttctccagagcataccccagcggaggccacccttccccagagcatccccgccgccaagcgcaaccttccagaagcagaccgcagcgacatggccaagaaaacagcgatcggcatcgacctgggcaccacctactcgtgcgtgggcgtgttccagcacggcaaggtggagatcatcgccaacgaccagggcaaccgcacgacccccagctacgtggccttcaccgacaccgagcggctcatcggggacgccgccaagaaccaggtggcgctgaacccgcagaacaccgtgttcgacgcgaagcggctgatcggccgcaagttcggcgacccggtggtgcagtcggacatgaagcactggcccttccaggtggtgaacgacggcgacaagcccaaggtgcaggtgaactacaagggcgagaaccggtcgttctacccggaggagatctcgtccatggtgctgaccaagatgaaggagatcgccgaggcgtacctgggccacccggtgaccaacgcggtgatcaccgtgcccgcctacttcaacgactcgcagcggcaggccaccaaggacgcgggcgtgatcgcgggtctgaacgtgctgcggatcatcaacgagcccacggcggccgccatcgcctatgggctggaccggaccggcaagggcgagcgcaacgtgctcatcttcgacctggggggcggcacgttcgacgtgtccatcctgacgatcgacgacggcatcttcgaggtgaaggccacggcgggcgacaccgacctgggcggggaggacttcgacaaccggctggtgagccacttcgtggaggagttcaagaggaagcacaagaaggacatcagccagaacaagcgcgcggtgcggcgcctgcgcacggcgtgcgagagggccaagaggacgctgtcgtccagcacccaggccagcctggagatcgactctctgttcgagggcatcgacttctacacgtccatcacgcgggcgcggttcgaggagctgtgctcggacctgttccgcggcacgctggagcccgtggagaaggccctgcgcgacgccaagctggacaaggcgcagatccacgacctggtgctggtgggcggctcgacgcgcatccccaaggtgcagaagctgctgcaggacttcttcaacgggcgcgacctgaacaagagcatcaatccggacgaggcggtggcctacggggcggcggtgcaggcggccatcctgatgggggacaagtcggagaacgtgcaggacctgctgctgctggacgtggcgccgctgtcgctgggtctggagaccgcgggcggcgtgatgacggcgctcatcaagcgcaactccaccatccccaccaagcagacgcagaccttcaccacctactcggacaaccagcccggggtgctgatccaggtgtacgagggcgagagggccatgacgcgcgacaacaacctgctggggcgcttcgagttgagcggcatcccgccggctcccaggggcgtgccccagatcgaggtgaccttcgacatcgacgccaacggcatcctgaacgtcacggccacggacaagagcaccggcaaggccaacaagatcaccatcaccaacgacaagggccgcctgagcaaggaggagatcgagcgcatggtgcaggaggccgagcgctacaaggcggaggacgaggtgcagcgcgagagggtggctgccaagaatgcgctcgagtcctacgccttcaatatgaagagcgccgtggaggacgagggtctcaagggcaagatcagcgaggctgacaagaagaaggtgctggacaagtgccaggaggtcatctcctggctggactctaacacgctggctgagaaagaggagttcgtgcacaagcgggaggagctggagcgggtgtgcaacccgatcatcagcgggctgtatcagggtgcgggtgctcccggggctgggggcttcggggcccaggcgcccaagggaggctctgggtcggggcccaccatcgaggaggtggattagaggcttttctggctctcagggtgttggctagagacagactcttgatggctgctggtgcacgattcttatcaagttactccttctctccggagttcagtttaaagttacagccttttatacggtaattgatttgagtttgttacattttgtatgctcgtgggttttttatatattcaaattaaggttgcatgttctttgcgtttaatctaagtagctgtgtaaaaatggtgtttccttcctgcgaacacctcagcactgccaccctgtgtacagttttttccttgcatccctacaaactgagaaaaaaagttatcttttgtaacttaaacattcaaaataaaatgttacaagt

SEQ ID NO: 1116 - DNA, 3089 bp, Rattus norvegicus
  Genbank Accession No. NM_031978
gatacactgcgcagtggaacggcgagtgcagggcgcagccatgatcacttcagccgctggaattatttctcttctggatgaagaagagccacagctcaaggaatttgcactacacaaattgaatgcagttgtgaatgacttctgggcagaaatttctgagtctgtagacaaaatagaagttttatatgaagatgaaggtttccgcagtcggcagtttgcagccttggtggcatcgaaagtattttatcacctgggggctttcgaggagtctctgaattatgctcttggagcaggtgacctcttcaatgtcaatgataactctgaatatgtggagactattatagcaaaatgcattgatcattataccaaacagtgtgtggaaaatgcagatttgcctgaaggagaaaagaagccaattgaccagagattggaaggcatcgtgaataagatgttccagcgatgtctcgatgatcacaagtataagcaagcgattggcattgctctggagaccaggagactagatgtgtttgagaagactatactggaatctaatgatgtcccaggaatgctagcttacagcctcaagctctgcatgtctttaatgcagaataagcagtttcggaataaagtattgcgagtcctggttaaaatctacatgaacttggaaaaacctgatttcatcaatgtttgtcagtgcttaatcttcttagatgacacccaggccgtgagtgatatcttagaaaagctggtaaaggaagacaacctgctgatggcctatcagatttgctttgatttgtacgaaagtgccagccagcagtttttgtcatctgtgatccagaatcttcgaactgttgggacccctattgcttctgtgcctggatctaccaatacgggtactgtgccaggaccagagaaagacagtgactctatggagaccgaggagaagacagccggtgcagtggcagggaaaacaccagacgctagtccagagcccaaggaccagacattgaaaatgattaaaattttaagtggtgaaatggctatcgagttacacctgcagttcctaatacgcaataataacacagacctcatgattctgaaaaacacaaaggatgcagtacgaaattctgtatgtcatacagcaactgtaatagcaaactcattcatgcactgtgggactaccagtgaccagttccttagagataacttggaatggctggccagagccactaactgggccaaatttactgcaactgccagcttgggtgtaatccataagggccatgagaaggaagcactacagttaatggcaacatacctccctaaggacacttctccaggatcagcctatcaggaaggtggaggtctctatgcattgggtctcattcatgccaatcatggtggtgacataattgactatctccttaatcagctcaagaatgccagcaatgatatcgttagacatggaggcagcttgggccttggtttggctgcaatgggaactgcacgtcaggatgtatatgatttgctgaaaacaaacctgtatcaggatgatgctgtgacaggggaggcagctggcctggccttaggtttggttatgttaggctctaaaaacacccaggcgattgaggatatggttggctatgcacaagaaactcaacacgagaagattctgcgtggtctagcagttggcattgcgttagtgatgtatgggaggatggaggaggccgatgctctcattgaatctctctgtcgtgataaggacccaattcttagaagatctggaatgtatactgtagccatggcttattgtggctctggtaacaataaagctattcgacgcctgctgcatgttgctgtaagtgatgtcaacgatgatgtcagaagagcagcagtagagtctcttggcttcattttgttcaggacgcctgaacagtgtccaagtgtggtctctttgttgtccgagagttataaccctcatgtgcgctacggcgctgcaatggccctgggagtctgctgtgctggtacaggaaacaaggaagcaattaatttactggagccaatgaccaatgaccctgtgaactacgtgcggcaaggggctctgatagcctcagctctcatcatgatccaacagaccgaaatcacgtgtccaaaggtaaaccagttccggcagctgtattccaaagtcatcaatgacaagcatgatgatgtcatggccaaatttggcgctattctggcccaaggcatactggatgcaggtggtcataatgtcacaatctccttacagtccaggactgggcacactcatatgccttctgtggttggcgtccttgtctttacccagttctggttctggtttcccctttcacacttcctatcattggcttatactcctacctgtatcatcggccttaacaaggatttaaagatgccgaaagttcaatataaatcaaattgtaaaccatccacattcgcataccctgcccctctggaagttccaaaagaaaaagaaaaggaaaaggtttccaccgctgtgttgtctattactgccaaagctaaaaaaaaagaaaaagaaaaagaaaaaaaggaggaggagaagatggaagtggacgaagcagaaaagaaggaagagaaagagaagaaaaaagaaccggaaccaaacttccagctgttggataatccagcacgggtcatgcctgcccagctgaaggtcttaagtatgacagagacctgcagataccaacccttcaagccactctccatcgggggcatcataattctgaaagacaccagcgaagacattgaggaacttgtggaacccgtggcagcacatggcccaaagattgaagaggaggagcaggagccagagcccccagagccatttgagtacatcgatgactagggccagggatcccacctgctcagctgtagatgactatcctggcacacactgaaatgtcgtgagggaacccacgctgagacccgctcgatccacacatcattgcctacgctgacataaggaacccgtgtcctgagtctttgattgagaagattctgactgttcagtgttctctttcacaaaaaaaaaa

SEQ ID NO: 1117 - DNA, 1846 bp, Rattus norvegicus
  Genbank Accession No. NM_031980
cggatgcctgggaagtggatttctgctctgctcctgctgcaaataagtttctgctttaaatctgggaactgcggaaaggtgttggtatggccgatggaatatagtcactggatgaatataaagataatactagaggaacttgtacagaagggccatgaagtcactgttctgagaccttcagcttctgtctttcttgatcccaaggaaacttctcaccttaaatttgtaacttttcctacatctttcagtagtcatgacctggaaaatttttttacaaggtttgtgagtgtatggacttatgagttgccaagagacacatgtttgtcatattttctttatctacaagatacgattgatgaatattctgactactgtctgactgtttgtaaagaagcagtttcaaacaaacagttcatgacaaaactacaggaatccaaatttgatgtcgttttctcagatgccattggtccctgtggagagctgatagctgaactgctccagattccttttctgtacagtcttcgcttctctcctggctacacaattgaaaagtacattggaggagttctattccctccttcctatgtacccatgattttttcaggattagctggccaaatgacattcatagagagggtacacaatatgatatgtatgctttattttgacttttggttccaaacatttagagagaagaaatgggatccattttacagcaaaactttaggaaggcccaccacattagctgagataatgggcaaagcagaaatgtggctcattagatcctactgggatttggagtttccccacccaatatcgccaaatgttgactacattggaggactccactgcaaacctgctaaacccttgcccaaggatattgaagacttcgtccagagctctggagagcatggtgtggtggtgttttctctggggtcaatggtcaggaacatgacagaagaaaaggccaacatcattgcatgggcccttgcccagattccacaaaaggttctttggagatttgacggcaaaaaacccaccaccttaggacccaataccagactctacaagtggcttccccaaaatgatcttcttggtcatccaaaaaccaaagcctttgtaacgcatggtggagccaatggcatctatgaggcgatccatcatggaatccctatgattggcattcccttatttggagagcaacatgataacattgcccacatggtggccaaaggagcagccgccacagtaaatttcaggacaatgtcaaagtcagatttgctcaatgcactggaggaagacatagacaatcctttttataaaaagaatgctatgtggttgtcaaccattcaccatgaccagcctacgaagccactggacagagctgtcttctggattgagtttgtcatgcgccacaaaggggccttgcacctgagatcacttggacataaccttccctggtacctgtaccactctctggatgtgattggattcctactttcctgtgtggcagtcactgtagtccttgctctaaagtgctttttatttgtttatcgattctttgtaaagaaggaaaagaaaacaaagaatgagtagagctcaatgataatgcatcacatgaatgaaatttgttcatcattttaagttatgaaccaccttctaaaaattcattaataactttacagaagcatattgtaattttgtatcatgtaaaaagacatataattctgaggcttctgatatgtgatcaaagaatcccatcatttattttaattttcaaactattcaatgtaaaacaatttgcctgtgtagaaaaatatataaataaagatttaattgaaaaaaa

SEQ ID NO: 1118 - DNA, 2280 bp, Rattus norvegicus
  Genbank Accession No. NM_031984
tgtaaatacagggctgaaagtgggagtggcgctccctcttcctgttatccccttggctcagcctcactgcctgatagaaatgtttctaatatggcacctggtcacagtccattgtagctgaactcccaggtcctgcactgtacaaccctcaccttcccagttcccttaccacctaataaagggcctgcctccggacagcgcccggcccgccgcgcccagctcagcctgctcagccctctggtcccgaggttccgctcagcgctctctcaaactagccgctgcaccatggcagaatcccacctgcagtcatctctgatcacagcctcacagttttttgagatctggcttcatttcgacgctgatggaagtggttacctggaaggaaaggagctgcagaacttgatccaggagcttctgcaggcacgaaagaaggctggattggagctatcacctgagatgaaaacctttgtggatcaatatgggcagagagatgatgggaaaataggaattgtagagttggcccatgtcttacccaccgaagagaatttcctgctgctctttcgatgccagcaactgaagtcctgcgaggaattcatgaagacttggagaaagtatgacactgaccacagtggcttcatagaaacggaggaacttaagaactttcttaaggacctgctagagaaagcaaacaagaccgtggatgatacgaaacttgctgagtacacagacctcatgctgaagctgttcgactcaaataatgatgggaagctggagctgacagagatggccaggttactaccagtgcaggaaaatttccttcttaaattccagggaatcaaaatgtgtgggaaagagttcaataaggcttttgagttatatgatcaggatggcaacggatacatagatgaaaatgagctggatgccttactgaaagacctgtgtgagaaaaacaaacaggaattggatattaacaatatttctacatacaagaagaacataatggccttgtcggatggagggaagctgtaccgaacagatcttgcccttattctctctgctggggacaactagagttggtggccacaaccacttgctagtgatacattgtatctaaaaccataactgtgcgctataaaggagtaggctgtattttcttttatatctgtaaattctactgcatatagagaattatccaggatgtgtggcacattcttttctgcttgtttctatactgtttgtaatgtacagtttttgtaagcatataattgaaaagaagaaagtctatgcttaggccagtcagtataatccattttcaaagatgaatctaacatgattctgctttcataaatacagatgaacacttggatttccctaaaactctaccatctcaacaattctagtgtcagatgtgtaaatgcacagctgtcagtgagtaaaagaataattcatgacaagccaagtgttttttaatttaggcaatcatagaactgtcccacaaagcacttctgtgcgttttccatctagtggaagggatgtgcttctgcttgtgaagcaccaaatgtcaatagttaactatggctttatcataaaacgatctccctagagatttaatttactgatcagtggcatgtctactgcttgaatagataccacactgttggttcaagctggcttggtggcaagggaaggtagccagatgacacataaatctgtctgatactatgcctatatttccaagaagtctattgcagagagtatgaccttagcccattttctaaattattttcatgtgttccagatgacaattattctagtaaactgctgttttgtgtcatattctgtgtgtactctctgattaaattcaatgtacctctgaggcctgtcgcagttgggctccggctcctttgcggagcaccatgtcgcagagggggaggagaccctgcagggcgcctgggtagaactgcacttcagcaatgggaatgggagcagcgttccagcttccgtctctatttataatggtgacatggaaaaaatactgctggatgcgcagatgaatctggacgaagcatctccaagagctctcactgtgacagcccacctcgctcccagacaccacaagataccaacaagagctgaaatagcaccacacgtttggtgagaaaaaacagcatgtgtgtctgaggaagattatattgagagaagaagagaagttgaaagtatcctgaagaaaactcagattggatatgggattggtcaagtcggccagaaaatgttcccccc

SEQ ID NO: 1119 - DNA, 2077 bp, Rattus norvegicus
  Genbank Accession No. NM_031986
gacccacgcgtccgggagccggagcgagcggcaggaacaacgcggtgttcggggcagaaaacacctgcaaaaatgtctctctatccatctcttgaagatttgaaggtagacaaagtaattcaggctcaaactgcctcttctgctaatcctgccagccaggccttttttttaaatgtggtcgattctgctgccttccctccaggtggaaatctctatcctaaactgtatccagaactctctcaatacatgggactgtctttaagtgaagctgaaatatgtgaaaacatgcctgtggtctctggagcgccaacccaagggcagttggtagcaaggccatccagtgtgaactacatggtagcacctgtgacaggtaacgatgcggggattaggagagcagagattaagcaagggattcgggaagtcattttgtgtaaggatcaagatggaaaaattgggctcagactgaagtcagtagataatggtatatttgttcaactagtccaggctaattccccagcctccttggttgggctgcgatttggggaccaggtgctccagatcaatggtgaaaactgtgccggctggagctccgataaggcacacaaggtgctcaagcaggcctttggagagaagattaccatgaccattcgtgatagaccctttgaacggacagttaccatgcataaggacagcagtggacatgttggctttatctttaaaagtggaaaaatcacatccatagtgaaagacagttctgctgccagaaacggccttctcactgatcaccacatctgtgagatcaacggacagaacgtcattggcttgaaggatgctcagattgcagatatactgtcaacagctgggactgtggtcaccatcacaatcatgcctgcctttatcttcgaacatattattaaacggatggctcccagcattatgaaaagcctgatggatcacaccattcctgaagtttaaaccttgtacagtgcatcaccgccgaacgcttccagtcttcctcttcggcaacttctctatttcaccgcacatgaagctttcccggatccagggagactgtgctgcatggagacctgtctatcttccaccatggctgggaacctcactctatctgagagcgtcttcagattttaagataggtgtagccttatcctggttttacagatgtgaactctcaaaagattccctgactttctagacttggttctttactgggaacctgatgtttttctataagccattgtgattaggatgactggtgtaggcttagctgtgtccgagaactggtctgctttctccgagaagtgcacagtgctaggcacgtgcttcagttctgtggcatatgtggagtgtagtacatcagcatagtacctgtaggatgagtgcctttgatcgcaactttttaagtgtgtgtgtgagtgtgtaaaattccagttaatcaacacttcattcacaaaagcattatacagttctgtgtaggtggcaagagactaatgattgtcactaaattctaacaccttcacctaatgtgcttcagttgtcgcctaacacagaagcatttagataaagcaaatagaaattattgctgccttctgaaacctgagaggtagctctctatcaagctgttctatgctagccctgagcagcttactggtgtcgcagagctgcctagctgtaccaagattttctagtcactgcataaaggaaacgcctaagagttgccgtattgctttctgagatacaaattgctatatatttcatgtaaaagttgttatactaaataggataaattttggagtctcttttcactcgtagataaagtgggtaatatctaatttggcacttgagtcctaacattatgtaactttagctaggttggggtgggtttagaatgtttccctagtcatctcagtttgttccattttctgactctatcctgcaaacaaaaatggcaatgacactttatcctgactctttccttcttagtttgtgcctatcttattattttatgtgatattatcctattaaatgtataaaaatattaaaaaaaaaaaaaaaaaaa

SEQ ID NO: 1120 - DNA, 2681 bp, Rattus norvegicus
  Genbank Accession No. NM_031987
gagtgcagagagccaagccgggtgcaggagttttcttactgtgactataccatggaaaatcaattggctaagtcaattgaagaacgaacattccagtaccaggactctcttccgcccttgcccgttccttcgcttgaagaatcactgaagaagtaccttgagtcagtgaagccatttgcaaatgaagacgaatacaagaaaactgaagaaatagttcaaaagtttcaagatggagttggcaagacattgcatcagaagttacttgaaagggctaaaggaaaaagaaactggctggaagagtggtggctcaatgtcgcctacttggatgtgcgtattccatcacaactgaacgtgaactttgtgggtccgtctccccactttgaacactactggcctgcaagggaaggcactcagttggaaagaggaagcatactactgtggcacaacttgaactactggcagctgctaagaagagaaaaattgcctgtacataaatctggaaatactcctctagacatgaaccaattccggatgctgttttctacctgcaaggttccgggaatcactagagattcgattatgaattattttaagactgagagcgaggggcattgtccgacccacattgccgtgctgtgtcgaggcagagcgtttgtcttcgatgtcctccatgacggttgtttgatcaccccaccagaacttctcagacaactgacatacatctaccagaaatgctggaatgaacctgttgggcccagtatagcggcattaaccagtgaggagcgaactcggtgggcgaaggcaagagaatatctgattggtcttgatccagagaacttgactttattagaaaaaattcaatccagtttatttgtgtattccatagaagacaccagtccacatgcaaccccagaaaatttttctcaggtctttgaaatgcttcttggtggagatccagcagtgcgctggggtgacaagtcctataatctgatttcctttgctaacggaatatttggctgtagctgtgatcatgctccttatgatgcaatgcttatggtgaacattgctcactatgttgatgagaagctcctagagacggaagggagatggaagggttcagaaaaagtccgggatataccgttgccagaggagctggctttcactgtggatgagaagatactgaatgacgtctaccaagccaaagcccaacacctcaaagcagcatctgatttacagatagcagcatctaccttcacatcttttggcaaaaagctcactaagaaggaggcccttcaccctgacacctttattcagctcgctcttcagctcgcctactacagacttcatggacgccccggttgctgctatgaaacagctatgacaagatacttttaccatggccgaacagagactgtgcgatcttgtacagtggaggccgtcaggtggtgccagtccatgcaggatccttctgccagtctccttgaacgtcagcaaaagatgttagacgcttttgcaaagcataacaagatgatgagagattgttcccatggaaaaggatttgaccgtcaccttttaggccttttgctcatagcaaaagaggaaggcctccctgttccagaactgtttgaggatccacttttctccagaagtggaggaggtgggaattttgtgctgtcaacaagtctggttggttacttacgaattcagggagtcgtggttcccatggtacataatggatacggctttttctaccacatcagagatgacaggtttgtggtgacatgttcatcctggaggtcatgtcttgagactgatgcagaaaagttagtggagatgatttttcatgctttccacgatatgatacatctgatgaacacggctcatctttagagactcagagacatacaggtcacagaaactgggtacggagaatgggatggtgatacgacatggaaggaatgttgacttaaaggaaacctgttaatgcagggattagagagggatgcactctagatttattctaccttaaagccttctgttgcaacagcaatgcaaactcagacatagtgaatagaactatgcaatgttttaagcctcaacaatgcacatctgtatattttaacaatacaaatcctactctaatgttaaaatatttttgttggcacatgtgtaggttgcaagtcctctgtgaacataattatagagtatttctcaagcactttaatactttctaatggccagagggtataaaacccatggttagatgctaatttccctgacatcagtgccttctacatccagcacaggagtacaagcctatgagatttcatgggaaaaccactattgttcaatattgatctaaaatagctcctttgaacagacaaaagtatcaagttgtattagaaaagaatattagcaaaactcattatgatatgttgtaattaattttgtgaatataaaatcaaaacacttccatttaaatctacttggtagagttagtggctttaaagggttaaatgtcgagtatgattctcagaactttataattatttcccactgttattcaaaatgttagcatatagacattctcccattgtaattcagtgtttatattctcaaagaataaagcatccagaatccttgtaatttctcatttattttcaataaaaatgattcctgat

SEQ ID NO: 1121 - DNA, 5350 bp, Rattus norvegicus
  Genbank Accession No. NM_032061
  misc_feature (1)..(5350): n = a or c or g or t
gggtaggagaaagggaagggtgggtaaggacggaaaaagcagcatcggtcagccgcgaaccccaggagaaaasstgggggcctgagccagaaccggagccctagcggcacaagscagacacccagggttggtcanctccgcatgatgagtctccggcttttcagcattctgctcgccgctgtggtctctggagcccagggctggggctactatggctgcaatgaggagctggtggggcctctgtatgcacggtctctgggtgcttcctcctactatggactctttaccacagcccgctttgcccggctacacggcatcagtggatggtcgccccggattggggacccgaatccctggctccagatagacttaatgaagaagcatcgaatccgggctgtggccacacagggagcctttaattcttgggattgggtcacacgttacatgctgctctacggggaccgtgtggacagctggacaccattctaccaacaagggcacaacgcgaccttcttcggtaatgtcaacgactcggcggtggtacgccatgacctgcactaccattttacggctcgctacatccgcatcgtgccactggcctggaacccccgcggcaagattggcttgaggctgggcatctacggttgtccctacacgtccaacatcctgtattttgacggcgatgatgccatttcataccgcttccagcgaggggccagtcaaagtctttgggacgtgttcgcttttagtttcaagacagaggagaaggacgggctgctgttgcacaccgaaggctcccagggggattatgtgacgcttgaactgcaaggagcacacctgctgctgcacatgagcctgggcagcagccccatccagccgagacctggtcacaccacggtgagcgctggtggcgtacttaatgacctaagctggcattatgtgcgggtggaccgatacggccgagaagcaaatctcaccctggatggttacgtacatcgctttgtgctcaacggcgactttgaaaggctgaatctcgaaaatgagatattcatcggaggtctagtgggcgcagcgcgtaagaacctggcctaccgccataacttccgtggctgtatagaaaacgtgatctacaaccggatcaacatagctgaaatggcagtgcagcgccattcgcggatcaccttcgagggtaatgtggctttccggtgcttggatcccgttccacaccccatcaacttcggaggccctcacaacttcgtccaagtgcctggctttccacgtcgaggccgccttgctgtctccttccgcttccgcacctgggacctcacagggctgctccttttctcccgcttgggggatgggctgggtcatgtggagctgatgcttagtgaagggcaagtcaatgtatccatcgcgcagactggccgcaagaagcttcagtttgctgcggggtaccgcctgaatgatggcttctggcatgaggtgaactttgtggcacaggaaaaccatgcggtcatcagtattgatgatgtggagggggcagaggtcagggtatcatacccactgctgatccgcacagggacttcatacttctttggtggttgtcccaaaccagccagtcgatggggctgccactccaaccagacagcattccatggctgcatggagctgctcaaggtggatggtcaactggtcaacctcactctggtagagtttcggaagcttggttactttgctgaggtcctctttgacacatgtggcatcacagacagatgcagccctaatatgtgtgagcatgatgggcgctgctaccagtcttgggatgacttcatctgctactgcgaactcaccggctacaagggagttacctgccatgaaccattgtataaggagtcctgtgaagcctatcgcctcagcgggaaatattctggaaattacaccattgatcctgatggcagtggacccctgaaaccatttgtagtgtattgtgatatccgagagaaccgagcatggacagttgtgcgacatgacaggctatggaccactcgagtgacaggttccagcatggaccggccctttctgggggccatccaatactggaatgcctcctgggaggaagtcagtgctctggccaatgcttcccagcactgtgagcagtggatcgagttctcctgctacaattcccggctgctcaacactgcaggaggctacccctacagcttttggattggccgaaatgaagaacagcatttctactggggaggctcccagcctgggatccaacgctgtgcctgtgggctggaccagagctgtatagaccctgcactgcactgcaactgcgatgctgaccagccacagtggagaacagacaaggggctcctgacctttgtggaccatctgcctgtcactcaggtagtgataggtgacacaaaccgctccagctctgaagctcagttcttcctgaggcctctgcgctgttatggtgaccgcaattcctggaacactatctccttccgcactggagctgcactgcgtttccctccaatccgtgccaaccacagccttgatgtctccttctacttcaggacctcggctccctcaggagtcttcctagagaacatggggggtcctttctgccagtggcgccgaccttacgtgagagtggagctcaacacatcccgggatgtggtctttgcctttgatattggcaatggggatgagaacctgacagtgcactcagatgacttcgagttcaatgatgacgagtggcatttggtccgggctgaaatcaacgtgaagcaggcccggctgcgagtggaccatcggccctgggtgctaaggcccatgcccctgcagacgtacatctggctggagtatgaccaacccctctatgtgggatctgcagagcttaagaggcgcccatttgtggggtgcttgagggccatgcgtttgaatggagtgactctgaacttggagggtcgtgccaatgcctccgagggcaccttccccaactgcacgggccactgcacccacccccggttcccctgtttccacggaggacgctgtgtggagcgatacagctactacacgtgtgactgtgacctcacagcttttgatggaccatattgtaatcacgatattggtggattctttgagactggcacatggatgcgctataacctccagtcagcactgcgttctgcggcccaggagttctctcacatgctgagccggccggtaccgggctatgagcctggctatatcccaggctacgacactcctggttacgtgcctgggtaccatggtcctgggtaccgcctacccgactacccaaggcctggccggccagtgcccggataccggggncccgtgtacaatgttactggagaggaggtctcctttagcttcagcaccagctctgctcctgcagtcctgctctacgtcagctcctttgtgcgtgactacatggccgtgctcatcaaggaagatgggaccctacagcttcgctatcagctgggcaccagtccctatgtgtaccagctaaccacccggccagtgaccgatggccaaccccatagtgtcaacatcacccgggtctaccgaaacctctttatccaggtggactacttcccgctgacagaacagaagttctctctcctggtggacagccagctggactcccccaaggccttgtatctagggcgtgtgatggagacaggagtcattgacccagagattcagcggtacaacaccccaggtttctcaggctgcctgtctggtgtccggttcaacaatgtggctcctctcaagacccatttccgaacccctcgccccatgactgctgagctggcggaggccatgcgggttcaaggagaactgtcggagtctaactgtggcgctatgccacgccttgtctccgaggtgccaccagagcttgatccctggtacctgcccccagatttcccatactaccatgacgacggatggattgccatactcttaggttttttggtggccttcctgctgctggggcttgtgggaatgctggtgctgttctatctgcaaaatcatcgatacaagggctcctatcacaccaacgagcccaaggccacccatgattcccaccctggcggcaaagctcccctacctccctcaggccctgcccaggcccctgcccccactccagctcccacccaggttccgaccccagccccagccccagcctctggcccaggccccagggaccagaacctcccccagatcttggaggagtccaggtctgaatgagtcacaagggcttcagggaccaaggccaactcctctaagtyccttmagctcctgcctctcctctcccctgtcagggacatttggctcttcttagcaggctctgttcaccaggaggatcccctcttgccaagtttggtgtgcagagctacagatgggaccaaagggagtggccgagtctcactgcctaaaccaatgccctgcccccaccccccaccccagctcctggctgtttgcctgccctacgggagaaagctcatggagctgaggcgggcctttcctgccatctctgtcccagctgctggcaaggattaacaaccaagggcaggggagatgaactgcctcccttcctgtgggtattatcagcagggacagatgtgggggatcgaggggctgcacagggcaggcagggagggagggaggaggctgctaaaacacaccctggagcctcccccctgccctrctgaccggctgtcttccatctrcttcctctcagctggggttgagggaagaacttcatccccaccccccacctcacccaaccctttttgttcttacagagaccaagaggcctcagcttagtcactttagtacctccactgcttcacatgctttagccaaagccataaaaagcctgcaagtagaagaaataatgcagaccctgcccagccagtcctctgctcctccacccctttccaaaatacgcaatagcctgggtgcctgtgtgcaggcctggcccccctccgtgcatgaggagccccccctcccccgctcagagatgctgcgtgttcgtccaggaggtcatattctttatatatattttttgttgcaaagcctctctctagagaactatatattactctaattttttaattatctgtttatatataaaagaactcagtgggccgtcctgtgctgtgcccagtttgtagtgagctccttctgtgttggatgtctcatgagtcctgccagccactcacccgcctgccgggcctccattctagagcagggcagagcccgctgtgccctcacctgagcaggttcaataaaagcagmgtggcagaaa

SEQ ID NO: 1122 - DNA, 1203 bp, Rattus norvegicus
  Genbank Accession No. NM_032615
aggtccggggctccggtccgtgccggtgcaggcgccggcatgtggctgtgggaggaccagggcggcctcctgggccccttctctttcgtgctggtgctgctgctggtggtgacgcgcagccccttcaacgcctgtgtgctcactggcagcctctacctcctgctgcggttcttcagcttcgagccggtgccgtcccgccgggccctgcaggtgctcaagccccgtgaccgcgtgtccgccatcgcccatcgcggcggcagccacgacgcgcccgagaacacgctggcggccatccggcaggcagctaagaatggagcaacaggtgtggagctggacatcgagtttacttctgatggagttcctgtcttgatgcacgataacacagtagataggacaacagacgggtctggccgattatgtgatctgacatttgaacaagttaggaaacttaatcctgcagcaaatcacagactcagaaatgagttccctgacgaaaggatccccaccctgagggaagcagttacagagtgcctctgccataacctcaccatcttcttcgatgtcaaaggccatgcagatatggcttctgctgctctaaagaatatatacatggaatttccccagctgtacaacaacagtatggtctgctcattcttgccggaagtcatctataaaatgagacaaacagatcagaaggtaatcacagccctgactcacaggccttggagcctgagccacactggagacgggaagcctcgctacagcgtcttttggaagcagtctgtgtttgtggtgttggacatcttgcttgactggagcatgcacaatgtcttgtggtacctgtgtgggatttcagccttcctcatgcagaaggattttgtctccccggactatttgaagaagtggtcagccaaaggaatccaggttgttagttggactgtcaatacctttgatgaaaagaattactacgagtcccaccttgggtccagctacatcactgacagcatgctggaaaactgtgcacctcacttctagactccccaggaggaaacacagatgcaaaactgcctggaggccttttgcagggacacgagaacactctgttagcacaagccctgggaatcctgcggctcatactagcaatagccacagttttaccccaagcagaaaccaggcatggcgaccatgctccaaggaaggctc

SEQ ID NO: 1123 - DNA, 620 bp, Rattus norvegicus
  Genbank Accession No. NM_033234
tgcttctgacatagttgtgttgactcacaaactcagaaacagacaccatggtgcacctgactgatgctgagaaggctgctgttaatggcctgtggggaaaggtgaaccctgatgatgttggtggcgaggccctgggcaggctgctggttgtctacccttggacccagaggtactttgatagctttggggacctgtcctctgcctctgctatcatgggtaaccctaaggtgaaggcccatggcaagaaggtgataaacgccttcaatgatggcctgaaacacttggacaacctcaagggcacctttgctcatctgagtgaactccactgtgacaagctgcatgtggatcctgagaacttcaggctcctgggcaatatgattgtgattgtgttgggccaccacctgggcaaggaattcaccccctgtgcacaggctgccttccagaaggtggtggctggagtggccagtgccctggctcacaagtaccactaaacctcttttcctgctcttgtctttgtgcaatggtcaattgttcccaagagagcatctgtcagttgttgtcaaaatgacaaagacctttgaaaatctgtcctactaataaaaggcatttactttcactgc

SEQ ID NO: 1124 - DNA, 783 bp, Rattus norvegicus
  Genbank Accession No. NM_033349
atgaagatcgaactactgcctgccctgaccgacaactacatgtacctgatcattgatgaggacacccaggaggccgccgttgtggacccagtgcagccacagaaggttatagaaactgtgaaaaagcaccgtgtgaagctgaccacagtgctcaccactcaccaccactgggaccacgctggtgggaacgagaagttggtgaagctggaacctgggctgaaggtttatggaggtgatgaccgcattggggccttgacccacaaggtcacacacctttccacactggaggtggggtctctcagtgtcaaatgtctgtcaacaccctgccatacttcagggcacatctgttactttgtgagcaagcctggtagctcagagccttctgctgtgttcacaggtgacacattgtttgttgctggctgtgggaagttctatgagggaaccgcagacgagatgtacaaggcgctgcttgaagtcttaggccggcttcctccagacacaaaagtcatctgtggccatgaatacaccgtaaacaaccttaagtttgcgcgccatgtggagcccggcaataccgccgttcaagagaaactggcctgggccaaggagaagaatgccatcggggagcccacggtgccatccaccctggcagaggagttcacttacaaccccttcatgagagtgaaggagaagaccgtgcagcagcacgctggagagaccgaccctgtgaccaccatgagggccatccgcagggagaaagaccagtttaaggtgcctcgggactga

SEQ ID NO: 1125 - DNA, 5531 bp, Rattus norvegicus
  Genbank Accession No. NM_033352
  misc_feature (1)..(5531): n = a or c or g or t
gagggactcgcccccggtggatgcggtggagtttgagctttttgctgcatccgtccctgaagaacaaaataagagtaagggagacaagctgcagagcatgggaggctgtggggttttctgaaacgtttgctgggctctccgcggagcatgagcttttaaaaggagttctttggagagaaatccatttgtgttagctggaaaaatgatacacatgctaaatgcagcagcctatcgggtgaaatggaccagatccggtgctgctaaaagggctgcctgcctggtggctgcggcatatgctctgaaaaccctctatcccatccttggcaggcgtttaaagcagcctggccaccggaaggcgaaagcagaagattacccgcctgcagagaacagagaaagactgcattgcacagagatcatctgtaaaaaacctgcgccgggactaaatgcagattttttcaaacagctactagaacttcggaaaatcctctttccaaaacttgtgaccactgaaacggggtggctctgcctccactcggtggctctaatctcacgaacgtttctgtctatctacgtggctggtctggatgggaaaatcgtgaaaagcatcgtggaaaagaagcctcggactttcatcatcaaactagtcaagtggcttatgattgccgtccccgctacctttgtcaacagcgctatcaggtacctggagtgcaaactggcattggcctttagaactcgcttagtggaccatgcctatgagacctattttgcaaatcagacttattataaggtgataaatatggacgggaggctggcaaaccctgaccagtctcttactgaagacattatgatgttctcgcaatcggtggctcacctgtattccaaccttaccaaaccgattttagatgtaattctaacctcctataccctcatccggacagctacatccagaggagcaagccccatcgggcccaccctgttagcagggctcgtggtgtatgccactgctaaagtcctgaaagcttgctcgcccaaatttggtactctggtggctgaagaagctcatagaaagggctacttgcggtatgttcactccagaatcatagccaatgtggaagaaattgccttctacagaggacataaggtagaaatgaagcaactgcagaagtgttacaaggctttagcttaccagatgaaccttattctatccaaacgtttgtggtacatcatgatagaacagttcctgatgaagtatgtgtggagcggctgtggactaattatggtggccatacctatcatcactgcaacaggctttgcagatggtgatctggaggatggccctaagcaggctatggttagcgatcggacagaggcctttaccactgctcggaatttactggcctctggagctgacgcgattgagaggattatgtcttcatacaaagagatcactgaactagcgggttatactgccagagtgtacaacatgttctgggtcttcgatgaagtgaagagaggcatttataagagaactgtcactcaggagcctgaaaacaatagcaagagtggaggtggcctggagctgcccctcagtgacaccctggcaatcaaagggacagtcattgacgtggatcatggaatcctttgtgaaaatgttcccataatcacgccggcgggagaagtggtggcttccagtctgaacttcaaagtagaagaagggatgcatcttttgataaccggccccaatggttgtgggaaaagctctctgttcagaatcttaagtgggctctggcctgtgtatgaaggagtcctttataaaccacctccccaacatatgttctatattccacagaggccgtacatgtctcttggaagtcttcgggatcaagtcatttatcctgactcggtggatgacatgcatgagaaaggttatacagaccgagacctagagcatattctgcacagcgtccacctctaccacatagtccaaagagaaggaggatgggatgcagtcatggattggaaagatgtcctttcaggaggggagaaacagagaatggggatggcacggatgttttaccataaaccgaagtacgcattgctggacgagtgcaccagtgctgtgagcattgacgtggaaggaaagatatttcaggctgctatcggggctggcatttccttactgtctataacgcacaggccttctctgtggaaataccacacccacctattgcaatttgatggcgaaggaggttggcgctttgaacagttggacactgctatccgcttaacgttaagcgaggagaaacagaagttggagtcgcagctcgctggaattcccaaaatgcagcagagactcaatgaactgtgcaaaattttgggggaagactcggtgctgaaaacgatccaaactgcagaggacacatcctaactgaccttgacatgttttaagttaacttctaggtgatgcctcagagactctttctttactgcatgcagtatgttaagctaagtgaagagaaagcaagccagcaaaaaaaaaaaaaaaagtattttgtatgatttcagcatcgaggaaatatgataactttttcgaatgaaaaaaaaagcgaacgaattagttgcggttagtcatgactcaggttagtgccccgtgagaggctagctcacctgtaaagtgggtttctagattaggagagtgtgtgtggttcttcctaggagagaatgccccaaaacaagacagcaggggcaccagctgggccgatgtcaggaattagacctttgagggctctttcaacccaggtaacggggacaataggtgcaacacctggaatctatagtcagcattgctaggggccaactcaaactgtgtacaaagtagcaggctgtttgatacatagtttcagtctgaaaagggtgtatccgaatgacagtggttgaaaacaagcacggctagacaagtataaagtactgtattaaattttttcataccttgagcatcttaatacagatacagaaattaacattaataaaaattgtgtgtatgtgtttaaaaaaaaacccttttatgttttaaaaagagaattgcccatacagaagaggacggtctgaacgatatttgttctggctaccgcttgactctgcagtcctatttagtacggtttctgtccagaaatactgtctgtctggtgcccaaaatggcattttagaaacttgattgctgccctaaatatggatcctggaaatcacagttatgttcctacattcattttaccttactccatcttttaagacatacaagtttttgttcctttttcttctgaaacgcgcgcgcgcacacacacacacacacacacacacacacacacacacacacacacagatttactttaatcacatgatttattttggaagagctgtagcgatcatgaaggtctccctcccccacacaccagacccagtgctgtcatcactaatggcccttaaatttaactgggatataatgtcagttttaaaangatgtggaccaggcagatggccagaaatggttgtaggcaaagcagggcataagggaaaaaattaaagcagataaataaatattattcaggcatagaagagtgacagttgcttctcttgtaggggacctgagttccattgccaacatccacatggtggctcaaacgtgtgtctaattccagctccaggggatctgacatacatgtagactccagggatcctgcatacatgtagtcctcatacacacatacatgcagacaaaacattcatagcattaaaaatcaataaatctgaaagatagtaaggatattgaaagctggcaatgttgatgttaccatcacttaattactgtttgcgagaagtgaaaattgagtgagaaatgcaatgggcgttggtcaacgcagctcggctgtgcacacccacctgatgccgaagtgtctgcagtgccagcgctcaggagggcagtacattgcacttccggtaagcttcacgctgctgaagatgacagagaccctcacatcatatgaaatacagtgcatctggagtacaaaaccacgactaatgctttaatctcatcctctctcagacatgacgaggtatgtgaaaacccgagatgaacagttttaggggcttaaggttttgtttctgtattcagacagcgctttagcagacactaactctcgataacagacggtttggaagacagaccccctagaagtcattcacaatgatggtcgtgagaaattgcagcatttccacattttcaattccgcaaaaatctacacaatttgaattaccaatcactgtgaccaccttacacaaaacaatacaaggtcataatcagtacctttgtatttgtctgttactgctacttcttactaataatgtgggacactaatgaaatatttggtttagcaaaagtataaaaccagaaattgacactgaattaaaaaaaaaaacacacaattcactaatctcttaacaaccgtgctagcagttacccaggttatagtgctaaaggagaatcatttgaagcaagggtcttatattagctctgacaagcacaagaggaaaattgaaagttcacatttgaaattataccatttcagacttaaaataaaccatgtaagacctgatatcctacgttttcaagctttgcgaaagatgccaacatcaatgctacattcggaactagaccttatttagtagaggttaccagcgagctggatcgaaataaataagactcgttacacagtggatgggggttcaacgatgtttggaattcggtactaaaactctagtcacgaaatttaaacgttaaggtttcaggactaactgtttcccagtagccttttggtaactactgatttaatgctggatatctttttttttcttttttttctttttttttccagagctggggaccgaacccagggccttgcgcttcctaggcaagcgctctaccactgagctaaatccccaaccccactactgattttctgaactgcctcttctgagccagagtaccctccgtcttagagggagaacccgatgtggatctgtgttgtgtataatctgactctttccaaagtgctcccacgggagaccagagctgatactctgacaggcatacttgtgaaaacacaaagaccactgagacctcttctttgactaggacaaagaataataaggaagacgaaggatagcttcatctgtcaaactactttttttttccttagaaaaggcataaatgtatggagttcgattatttcggggaataactcaaaacctgcattgtgacatccgatctctggagcatgctatggtatgccaagcacccaagcacactgtgttcactcttacagacgagataattgctaaaatcctcttgagtcacaaggtcggtgatcgtacttgaaaaccagcccagttcaccctatgtttacacgggaagagttttcctttgatagcaatttgacttttgacccaaattttggcgtgtcaataaaggtataagc

SEQ ID NO: 1126 - DNA, 2563 bp, Rattus norvegicus
  Genbank Accession No. NM_052798
cggaacagtctaagggtgttcactttggggactcagtgagtccccctctgttatggagtacagtgtctcttgaatcttacttctggaaatccacggacaagaagactggtgacctatcgattttgtgatgcccacccctggctcctggttccctctctagaggcagaagagccaggcgcagctaatgggacgctttcggagatgctgcgtctgacaggtgcgaagcaacatgtgcaactcctttcttcttcctcccctcagatcctcctccatcttcacccatctttagaggaagagcctacagaaagaagatggctcctgagcaaagagaaggggcctctcaggtgtcagtgacatttgaagatgtggctgtgctctttactcgggacgagtggaagaagctggatctgtctcagagaagcctgtaccgtgaggtgatgctggagaattacagcaacctggcctccatggcaggattcctgtttaccaaaccaaaggtgatctccctgttgcagcaaggagaggatccctggcaggtggagaaagagggccccagatacttctctctcggattgaagtgcagtcatagaaccactaagtcaactcaaacacaagactcttcatttcaggaactgattgtaagaaaatctaaaagaacctttgccttcgaacctttgaacatgaagtcagaaaatcttttcatacatgaaggcaaattagaggaaaagtgggataagaatactttgactgtagaaagaagccataaaaacaatgaatttagcccaaagtcccatagagaaaaacggtcctcagaatgtaaaaagcagatatcttatttatctaacccaccaggaatcacaccggataaacgctataaatgtagcatgtgtgagaaaaccttcattaacacctcatctcttcgcaaacatgagaaaaaccatagtggagagaaattatttaaatgtaaagaatgttcaaaagccttcagccaaagttcagcccttattcaacatcaaataactcacactggagagaagccttacgtatgtaaagaatgtgggaaggccttcactctcagtacgtccctgtataaacatctcagaacccacactgtggagaaatcctacagatgtaaggaatgtggtaaatcctttggccaaaggtcaggtctttttatacaccagaagatccatgcccgagaaaaccctcatagatataacccaggaaggaaggcatccgcttccctctctggatgccagagagctcattccaggaagaagacctacttgtgtaatgaatgtggcaacaccttcaagtctagctcctccctccgttaccatcagagaatccacaccggagagaaacctttcagatgtagcgaatgcggcagagccttcagtcagagcgcatcacttattcagcacgaaagaatccacacgggagaaaagccctacaggtgtggcgagtgtgggaaaggcttcacttctatctcaagactcaatagacaccggataattcatacaggagagaaattgtataattgcaatgagtgtggcaaagccttaagttcccactcaactcttattattcacgaacgaatccacactggagagaaaccgtgtaaatgtaaagtttgtgggaaagccttcagacagagttcagctctgatccaacatcagagaatgcacactggggaaagaccctataaatgtaatgagtgcgggaaaacattcaggtgtaactcatccctaagtaaccaccagcgaatccacactggagagaaaccttatcaatgtatagaatgtgggatgtcgtttggacaaagttctgctcttattcagcaccgaaggattcacacgggagagaaaccgtttaaatgtaacacatgcggaaagacctttaggcagagctcctcacgtatagcacatcagcgaattcatactggggagaaaccctacgaatgtaacacgtgtgggaaacttttcaactataggtcatcccttaccaatcattataaaatccatgtggatgaggacccttaaaaagtaaatttgcatgtaaaaaagccttaaaccaaagctcttcagagaatgggcttgagagctgtaataaacatactatggcgtccctgtagtcatttagttactgtcaactaaattccatggataaatcctgtgtaacaggtaggagtgaaatattcatgcctgtccaacactttaaaaaaattgcttgaaatccggtggttatgtgtagtcctggctaccggggaccctgaggattgcttgactccacaagtttgaagagcaaatgttatggagctttccatctcagaagattagtgacctgaaatgaagaattcacagctgaaggccttgacttcaggtatttggaaaatggtgcttttctctctgcaacagtgtgtgctagatacaattgtaatcataggcatctaagtgaacagaggagtgggatggacttagcaaaacacaaaactctactgttgtgatacttttatactattttaataatatccaaaagggatcaacacaaatcaaaaaaaaaa

SEQ ID NO: 1127 - DNA, 704 bp, Rattus norvegicus
  Genbank Accession No. NM_052802
caaacgcctccttgttcctctttttgcctccatccagtcaactgtggaaagccaccctcaaggacagagtacaagaatgtataaaagcctgggagaactcttcctggactaattccttcctcctgctcactggttgccttaaccctactgaagcatgatgatctgcaaggtcctggtgatcactgtcttctgtgtgctgactgtggctttccccagtttggacatagattcaatcaatgaagaactacaggattcaatctttgatatactaaactcaacctctgacttccaactggcatcatatgaaccatcaacatctcctccagaggatagcacataccaggaatcaaacactgacttcatgcaaaccacatattccaaaagcatacagatttctgagctctctaatggagctgagacagtctcttccagcttcctggaagaagtcactgagacttcagaaagcacagtggagtttccattagctgagacaactacattctcctctacctcctgagaagactttgaaacaagcctgtgactaccattctggatattgagtctttgtagaaaatcatgtaagtctaagatgctcccagcaaagaagaaagaacaaggaagtggtcctggatgagaaatgctgtgtcaggcacttatgagctctgcccttacctttgtgggcttaataaataaatgttcatcgc

SEQ ID NO: 1128 - DNA, 2461 bp, Rattus norvegicus
  Genbank Accession No. NM_052806
ccgggacatacgctcactcgcggttccattgtagagtgaccggctgccacccggctggccatgaggggtacgcccctgctcctcgtctctctgttctctctgcttcaggacggggactgccgcctggccaacgcagaggagaagctgatggatgacctcctgaacaaaacccggtacaacaacctgatccgcccagccaccagctcctctcagctcatctccatccgcctggagctatcactgtcccagctcatcagtgtgaatgagcgagaacagatcatgaccaccagcatctggctgaaacaggaatggactgactaccgcctggcctggaacagctcctgctatgaaggggtgaacattctgaggatccccgcaaagcgtgtctggttgcctgacatcgtgttgtacaacaatgccgatggcacctatgaggtgtctgtctacaccaacgtgattgtgcgttccaacggcagcatccagtggctgccccctgctatctacaagagtgcctgcaagattgaggtgaagcactttcccttcgaccagcagaactgcaccctcaaattccgctcctggacctatgaccacacggagattgacatggttcttaagtcgcccacggccatcatggatgacttcacccccagtggtgaatgggacattgtggccctcccaggacggaggacggtgaaccctcaggaccccagctacgtggatgtgacctatgacttcatcatcaagcgcaagccgctcttctacaccatcaatcttatcattccttgtgtgctcatcacctcgctggctatcctggtcttctacctgccctccgactgtggggagaagatgacgctctgcatctctgtgctgctggcactcacgttcttcctgctgctcatctccaagatcgtgcctcccacctcccttgacataccgctcattggcaagtacctcttgttcaccatggtgctggtcaccttttccatcgtcaccactgtgtgtgtcctcaatgtgcaccaccgctcacccagcactcacaccatggcatcctgggtcaaggagtgcttcctgcacaaactgcccaccttcctcttcatgaagcgtcccggtcttgaagtcagcctggtcagggtccctcatcccagccagctgcacttggccacagctgatactgcagccacctctgccttaggccccaccagcccatccaacctctatgggagttccatgtactttgtgaaccctgtccctgccgctcctaagtctgcagtcagctcccacacagcaggcctccccagggatgcccgtctgaggtcctccgggaggttccgggaagatctacaggaagcattagagggtgtcagcttcatcgcccagcatctggagagcgatgaccgagatcaaagtgtcatcgaggactggaagttcgtcgcgatggttgttgaccgcctgttcctgtgggtgttcgtgtttgtgtgtattctgggcaccatggggctcttcctgccaccccttttccagatccacgcaccctccaaggactcctaggctacccggcgtgcctcgggcccgggttgtagtgagatgatatgagaagccgtgtgggaagctgggcgtgtcttggcccgggttgtagtgagatgatatgagaagccgtgtgggaagctgggcgtgtctcgggcccccgggttgtagtgagatgatatgagaagccgtgtgggaagctgactgttccatttgggccatagctaatgaagccctaagtaaagccgtgactattggcaatcagcccatcaaactagccacagccacgagaaggacagagatagatgccttctgctgatccctctgatgccgtccagtaagtccctgaaggaggaggatgaggctgctgaataccagcctggcctccttccttccacgtgccaggcaccggagtcagacagccgtgtatcatgccgtcacaccccagcccgccttcccacccatctccctctgattcgcagctacccactagattcccccaccatctttcatttccatacacttctagattctcccaagtcagaacctttatatcttctactgctaccgtccaaacctcactgtaaactcccaagcttttcacgtggctgcaccagtcagagctctgctccaatgccacttccttgtataagccttcccatgatcctctgctccagtgtcatttccttgtataagccttccctagtcatgcattgcaaagcagtgtctcccataaccacatcaaatctccagcttccttgagtgttccccgtcagtagctgcagcctttagttggtggcacactagtcaccagcaccttgcccataaaagtgtatgctccataagggctgggtgtgtggattcacattcactccagagcttgggacccagctctgcacacagaaggtgcaaaataaatgtttattgaatgaaaaaa

SEQ ID NO: 1129 - DNA, 1458 bp, Rattus norvegicus
  Genbank Accession No. NM_052809
gagggtttaggctggtctccggtgacctcctagtcctaaatcttgatacccttgcaagagctttgagcgtgtggggtcccgggcgttcggggtcccgggtgtgtgcggtttgtatagcctgaagccggggtcctccgcgctcgcgtcctccgcagctggactgaagagacgcgtcccagccctgcggggatggaacggaccgagctgctgaagccccggaccctggccgacctcatccgaatcttgcatgagctcttcgccggggacgaagtcaatgtggaggaggtgcaggctgtgctggaagcctacgagagcaatcctgccgagtgggctttgtatgccaaattcgatcaatacaggtatacccgaaaccttgtggatcaaggaaatgggaagtttaatctgatgattctgtgctggggtgaagggcatggcagcagtattcacgatcacacggactcccactgctttttgaagctgctgcaaggaaatctaaaggagacattgtttgactggcctgacaagaaatccaacgagatgatcaagaagtctgaaagaactttgagggaaaatcagtgtgcctacattaatgattctattggcttacatcgagtagagaacgtcagccacacagagcctgctgtgagccttcacttgtacagtccacctttcgatacatgccatgcctttgaccaacgaacagggcataaaaacaaagtcaccatgacattccacagcaaatttggaatcagaactccatttacaacttcaggttcactggagaacaactaagacctgccaagcctttcaaagttttgcttctgggtcgttggaatgttttaccttggataagagaggccacccatcatttgctgtccagttatacattttaataagtccatgctcagtgtgtatactaaggaagcaaaccatcccctgagctatgcaggagaaaaatcccactaaagaaaaagtcacttgatttttaatagccaaatcaccttgctcccagttcttctgtcttctaactccatggaaattctattgggagttctcagtggggttttttttcaaccttaggaaagcacttctggtctctgaactctaataatcaataagtaaaaatgaagaaaccacaagctatcacatgtctgttttcatacctggaagtctaagtgtggaaatctttaatttactttgtatgttcttaatgtttgacaagaatttttttaaatcttggttttcagttttttcaaccctgtttgacaaattcctatgctgtggagactagggatgcagatagcagtttggtgtttggtagtgaacagcagtggggccagaaatgtgcatgtatccagacctcctgcaaataaaaactgaaactcatgtgtaatgtgtgccaccaccttaagctgccaccaaaattgccaaacgactttaataaaactggatttgaga

SEQ ID NO: 1130 - DNA, 1675 bp, Rattus norvegicus
  Genbank Accession No. NM_053291
ggcctctctccgggcctctcgacctcacggtgttgccaaaatgtcgctttctaacaagctgactttggacaagctggacgtgaaggggaagcgggtcgtgatgagggtggacttcaatgttcctatgaagaacaaccagataacgaataaccaaaggatcaaggctgctgtcccaagcatcaaattctgcttggacaatggagccaactcggttgtgcttatgagccacctgggccgtcctgatggtgtgcccatgcccgacaagtactccttagagccagttgctgcagaactcaaatctctgctgggcaaggatgttctgttcttgaaggattgtgtgggctcagaagtagagaatgcctgtgccaacccagcggctgggactgtcatcctcctggagaacctccgctttcatgtagaggaagaagggaagggaaaagatgcttctgggaacaaggttaaagctgagccagctaaaattgatgctttccgagcctccctgtccaaacttggagatgtctatgtcaatgatgcttttgggactgcacacagagcccacagttccatggtgggtgtgaatctgccacagaaggctggtggatttttgatgaagaaggagctgaactactttgccaaggctttggagagtccagagcgacccttcctggctatcttgggaggagctaaagttgcagacaagatccagctgatcaataatatgctagacaaagtcaatgagatgatcatcggtgggggaatggcttttaccttccttaaggtgctcaacaacatggagattggcacatctctgtatgatgaagagggagccaagattgtcaaagatctcatgaccaaagctgagaaaaatggtgtgaagattaccttgcctgttgactttgtcactgctgacaaatttgatgagaatgcaaagactggccaagctactgtggcctctggtatacctgctggctggatgggcttggactgtggtactgagagcagtaagaaatatgctgaggctgtggctcgagctaagcagattgtttggaacggccctgttggggtatttgaatgggaagcatttgccaggggaaccaagtccctcatggatgaggtggtgaaagccacgtctaggggctgcatcactatcataggtggtggagacaccgccacttgctgtgccaaatggaacacagaggataaagtcagccatgtgagcactgggggcggcgccagtttggagctcctggaaggtaaagtccttcctggggtggatgctctcagcaatgtttagtattttcctgccttttggttcctgtgcacagcccctaagtcgacttagtgttttccgcatctccatttggtgttagtgcagctagtggccaagacgagcaccaggaacctaagcagcagctgcacagcatctcagctcgtctttactgcatgggattcattatagttaagtccatttaatttcttagtgactaaaccttgcattaaggcatatatttatactctgcctgtgaaaggaagtgagctgtaaaagcttagctctcttcgctgtatgtagcctctggttagcctgtcactgttcatgacagcatggaaataacgatgaggattccagctgtaggtttgggaggttgatgatattgaaccaataaaagatcccact

SEQ ID NO: 1131 - DNA, 1994 bp, Rattus norvegicus
  Genbank Accession No. NM_053309
ggcacgagcgggagggaccggcggctccgcccgagcgcggccgcccagccccgggccgcccagccgcccagcccccgccctcccgccggcccgcgcctggcggcggccccgacaccgacagagcagccgcgctgccggcggaatggagcggcgccggggctgagccgggcgcactcgggccgccgcatgtgccgcgcggggagcagctgccgagcgggcggagagcgaacgccaggggccccgtcggagcggccacaggagcagcgccggagatgggagagcagcccatcttcaccacgcgagcgcacgtcttccagattgaccccagcaccaagaagaactgggtgccggcaagcaagcaggccgtcactgtttcctacttctacgatgtcaccaggaacagctatcggatcatcagtgtggatggagccaaggtaatcataaacagcaccatcaccccgaacatgacgttcaccaaaacttcacagaagttcgggcagtgggctgacagcagggccaacaccgtgttcggtctgggattctcctcagagcagcagctcacaaagtttgcagagaaattccaggaggtaagagaagctgccaggttagccagagacaagtcccaggagaaaatcgagacgtcaagtaatcattcccaagaatctgggtgtgaaaccccgtcttccactcaggcatccagcgtcaatgggacagatgacgagaaagcctcccatgcgagtccggccgacacacacctcaagtctgagaatgacaagctgaagatcgctttgacacagagtgctgccaatgtgaagaagtgggagatcgagctgcagaccctgcgggagagcaatgcccggctgaccaccgcgctgcaggagtcggcggccagtgtagaacagtggaagcggcaattctccatctgcagagatgagaatgacaggctccgcagcaagattgaggagctggaagaacagtgcggtgagatcaacagggagaaggaaaagaacacccagctgaagaggaggattgaggagctggagtcagaggtccgagaaaaggaaatggagttgaaggatctccgcaaacaaagtgaaatcatacctcagctcatgtccgagtgtgaatatgtctctgagaagttagaggctgcagaaagagacaatcaaaacttggaagacaaagtgcggtctctaaagacagacatcgaggagagtaaataccggcagcgccacctgaagggggagctcaagagcttccttgaggtgctggacggaaagatcgatgacctccacgacttccgccgagggctctccaagctaggcacggataactagggtggggcggagcctagatggagagtggaaagcgtgtgtgagagatgaagtgggcatagggcattctccgtttgcttctgtaatgcgggtgcgttctgtctgtctccaggccagtcgtgccgtccactcgctcctccagaatagaaaatctcttgcttctctggctttgtgaggtcgtggacacctggaagcttctgactcaggaatccagaacggtctaccttagccgtttacgcagtcagggcagggacattcagatcttcccttaagggctgttgcaaccctatgaactggggatgggggaagtattttctaatccaagtatcattaacctttacaacaggcctttgggcgccttccgctgcgtggcactcagtgtgtgagactctagattccagaccgggagcacgtggagggaacatcttttcccaggatgcattctgttcctttagcagaggtagctaacctttcgaagttatgacagatttcacactcaaaaactgcacaattgatctacccaaaaagaaataattatttaaaaaaaaaaacctaacatattttaagtaaatacactgttttgggttggagcgcattcatagttaccctcagctgcatgtggcctttggactgtaggccacacaaacctcgtgccgaatt

SEQ ID NO: 1132 - DNA, 505 bp, Rattus norvegicus
  Genbank Accession No. NM_053319
ggagagcggccgcgctgtcgcctctgctgcttgagcggcgccagcaccttccctaggagctcgcagcagccggctggcccctgctccacggtaaccatgtgcgaccggaaggcggtgatcaaaaatgcagacatgtcggaagagatgcaacaggactcggtggagtgcgctactcaggcgttggagaagtacaacatagagaaggatatcgcggcccatatcaagaaggagtttgacaagaagtacaaccccacctggcactgcatcgtgggccggaacttcggtagctacgtgacacacgagaccaaacacttcatctacttctacctgggtcaggtggccattctcctgttcaaatctggttaatagcatggactgtgccaaacacccagtgatccatccaaaaacaaggactgcatcctaaattccaaataccagagactgaatcttcagccttgctaagggaacacctcgtttgaatctgttgtgttttgtacagggcacc

SEQ ID NO: 1133 - DNA, 1812 bp, Rattus norvegicus
  Genbank Accession No. NM_053329
atggccctgaggacaggaggcccagccctggtggtgcttctggctttctgggtggcactgggcccctgtcacctgcaggggacagatcccggagcgtcggcagatgccgagggcccccagtgccccgtcgcctgtacctgcagccatgatgactacacagatgagctcagcgtcttttgcagttcaaagaacctcacacatctgcctgatgacatcccagtcagcaccagagccctgtggcttgatggcaacaacctctcttctatcccctcagcggccttccagaacctgtccagcctggactttctcaacctgcagggcagctggctgaggagcctggagccacaggcactgctggggctgcagaacctctactatctgcacctggaacggaaccggctccggaacctcgccgtgggcttgttcacacacacaccgagtctggcttcactcagcctgagcagcaacctcttgggccggctggaggaagggctgttccagggcctcagtcacctttgggacctcaacctgggttggaacagtctagtggtcctgcctgacacagtgttccagggactgggcaacctccacgagctggtgctggctggcaacaaactgacttacctgcagcctgcgctcttctgtggcttgggcgagctgcgggagctggatctgagcaggaacgcactccgaagcgtcaaagctaacgtctttgtacatttgcccaggctgcagaagctgtacctggaccggaacctcattacagccgtggcccctcgtgcctttctgggcatgaaggccctgcgttggctggacctgtcgcacaaccgcgtggctggcctcatggaggacaccttcccaggcctgctgggcctgcacgtcctgcgcctggcacacaatgcgatcgctagcttgcggccgcgcactttcaaagacctgcacttcctggaggaactgcagctgggccacaatcgaatcaggcagctcggggagaggacattcgagggcctggggcagctggaggtgctgacgctcaatgacaaccagatcactgaggtcagggtgggcgccttctctggccttttcaatgtggcggttatgaatctctccggcaactgtctgaggagcctcccggagcgggtgtttcagggtctggacaaactgcacagcctgcacctagagcacagctgcctgggtcacgtccgcctgcacacttttgctggcctctcagggctgcgcaggctcttcctcagggacaacagcatctccagcatcgaagaacagagcctggcagggctttcggagctcctggaactggatcttactaccaaccgcctcacacatctgccccgccagctcttccagggcctcggccacctggagtacctgcttctctcctacaaccaactgacgactttatccgcggaggtcctgggccctctgcagcgggccttctggttggatatctcacacaaccacctggagacgctggccgaaggccttttctcatctctggggcggcttcgctacctcagcctcaggaataactccttgcagaccttttcaccacagcccggcctggagcgcctgtggcttgatgccaacccctgggactgcagctgtcccctcaaggcgcttcgagactttgccctgcagaaccctggtgttgtcccccgctttgttcagactgtctgtgagggggacgactgccagccggtgtacacctacaacaatatcacttgcgctggccccgccaacgtctcgggcctcgacctaagagacgttagtgaaacacattttgtgcactgctga

SEQ ID NO: 1134 - DNA, 554 bp, Rattus norvegicus
  Genbank Accession No. NM_053330
ctttccgccggggcagccatcttccagtaactcgccaaaatgacgaacacaaaaggaaagaggaggggtactcggtatatgttctctagaccttttaggaaacatggagtcgttcctttggccacatacatgcgaatctacaagaagggtgatattgtagacatcaagggaatgggcactgttcaaaaaggaatgccccataagtgttaccatggcaaaaccggaagagtctacaatgtcacccagcatgccgtgggcatcattgtgaacaagcaagttaaaggcaagattctggccaagaggatcaatgtgcggattgagcacatcaagcactcaaagagcagagacagcttcctgaagcgggtgaaggagaacgatcagaagaaaaaggaagccaaagagaagggcacctgggttcagcttaacggccagcctgcgccacccagagaagcccactttgtgaggactaacggaaaggagcctgagctgctggagcccattccatacgaattcatggcctaatgtatacaaaggaaataaagaacccgaactgc

SEQ ID NO: 1135 - DNA, 1607 bp, Rattus norvegicus
  Genbank Accession No. NM_053341
cctcgagcggcggcggcgcaggtctcccggccaagtccccacttctggctgctcatgccactgggactggggcgaaggaaaaaagcaccacctctggtggaaaatgaggaggcggagccaagccggagtgggctgggcgtcggggagcccgggcccctgggtggaagtggagcaggggaatcccagatgggtttgcccccacctcctgcttccctccggcctcgcctcgtgttccatacccagctggcccacggcagccccacgggccgcatcgagggcttcactaatgtcaaggagctgtacggcaagatcgctgaggccttccgactaccggctgctgaggtgatgttctgtaccctcaacacccataaagtggatatggacaagctgctggggggccagatcgggctggaggacttcatctttgcccatgtcaaggggcagcgcaaagaggtggaagtattcaagtctgaggatgctctggggctcaccatcaccgacaacggggccggctatgccttcattaagcgcatcaaggaaggcagtgtgattgaccacatccagctcatcagcgtgggtgacatgattgaagccatcaacgggcagagcctgctgggctgtcggcattatgaggttgccaggctcctcaaagagctgccccgaggccgcaccttcaccctcaaactcaccgaacctcggaaggcgtttgatatgatcagccagcgttcatcaggtggtcaccctggctcaggcccacaactgggcactggccgagggaccctccggctccgatcccggggccctgccacagtggaggatctgccgtcagcttttgaggaaaaggccattgaaaaggtggatgacttgctagagagctacatggggatcagagacacagagctggctgccacgatggtggagctggggaaagacaaaaggaacccagacgaactggcagaagctctggatgaacggctcggtgacttcgcattcccagatgaattcgtctttgatgtctggggagccatcggggatgccaaggttggccgctactaagactgggactgaacctggaccttgagataacctgctttgcccagctggggtttccagaaaccacagccaagacctgggctgacagcttaggctgtaactccgcagcctggggatggcacaggctgcaagtgccctgtggtccaggccccgctccaatcagtaccgccacggtgcccagcctggttggggtccccggccaacccctgccgggttccccacctacctcaatagagtaagcgcatggggagggaccaacacactaggcagccagccacctctatccccaacacttcccactatcagctggcaactgccccttctgtccccctggcctcagctctcttcggggtcatgacctccctactttactttttttgctttgtttttttcaagacaaagtcactatgtagctctggctgtcctggaactccttctgtaaaccaggctggccttgaactcacagagatccacctgcatctgcattcacagtgctgggaataaaggtgtgcatcaccactcccaaaaaaaaaaaaaaaaaaaaaaaaaaaaaa

SEQ ID NO: 1136 - DNA, 3950 bp, Rattus norvegicus
  Genbank Accession No. NM_053380
ctgcggagggagcgctgaccatggctccttggcccgagttggaaaatgcccaccccaaccccaataaattcatcgaaggggcctcaggtccacagtctagcataccagacaaagacaaggggaccagcaaaacaaatgacagcgggactcctgtagccaagattgaacttctaccctcatattccgccctggttctcatagaggagccccctgaggggaacgacccctgggacctgcctgaactccaagacaatgggatcaaatggtcagagagagactccaaagggaagattctctgcattttccaggggattgggaaattcatccttctcctggggtttctctacttgtttgtgtgctccctggatgtactcagtagtgccttccagcttgttggaggaaaaatggccggccagttcttcagcaacaactccattatgtctaatcctgtggctggacttgtgataggggtgctggtgacagtcatggtgcaaagctccagcacgtcctcgtcaatcatcgtcagcatggttgcctcctccttgctgtcagtccgcgctgccatccccatcatcatgggtgctaacatcgggacctccatcaccaacacgattgtggcacttatgcaggcaggagacagaaatgagttcagaagggcatttgcaggagctactgtccatgacttcttcaactggctctctgtgttggtgctcttacctctggaggctgccacccattacctggagaaactgaccaaccttgtgttggaaaccttcagcttccagaatggagaagatgccccagacattctgaaagtcataacagaccccttcacaaagctcatcatccagctggataaaaaagtcatccaacaaattgcaatgggtgactcagaagcccagaacaagagcctgatcaagatctggtgtaaaactataagcaatgtgattgaggagaatgtcactgtcccctcgcctgataactgcacctctccttcatattgctggactgatggcatacagacctggaccatccagaatgtgactgagaaggagaacattgctaaatgccagcacatcttcgtgaatttcagcctcccagacctcgctgtgggcatcatcctgctcactgtctccctgctgatcctttgcggctgtctgatcatgattgtcaaactgttgggttctgtgctcaggggacaggttgccactgtcatcaagaagacccttaatactgatttcccctttccctttgcctggctgactggctacctggccatccttgtgggggcaggcatgaccttcatagtgcaaagcagctctgtgttcacttctgccatgacgccactcatcggtattggggtgatcagcatcgagagggcatatccactcacgctgggctccaacattggcaccaccacgactgccattctggctgccttggccagcccaggcaacacattgaggagttccctccagattgccctgtgccattttttcttcaacatctctggaatattgctgtggtacccaatcccattcacccgtctgcccatccgtctggctaaaggcctgggcaacatctctgccaagtatcgctggttcgcagtcttctatctcatcttcttcttcctcctgaccccgctgacagtgtttggcctgtccctggctggctggccagtgctggtgggcgtgggtgtgcccatcattctgctgatcctcctggtcctgtgcctccggatgctgcaggcccgctgccctcgcatcctgcccctgaagctccgggactggaatttcctacccttgtggatgcactctctgaaaccctgggacaacatcatctccctggccacctcctgcttccagaggcgctgttgctgctgttgccgtgtgtgctgccgtgtctgctgcatggtgtgtggctgcaagtgctgccgctgcagcaagtgctgcaagaacctggaggaggaggaaaaggagcaggacgtcccagtcaaggcttctgggggctttgacaatacagctatgagcaaagaatgccaagatgagggcaagggccaagtggaagttctgggcatgaaggccctgtccaacactacagtgttctaggagcacctagtagtcaggggtgcctccctcccataagacagaacagagatgtagactgtgaacatggcccacagatgaccacatccacccatggcctataatgccttcaaagtccatcctcacccaaagacattaagagggaggcattagggaaggttctggaaagatccaatgtaaagagtatttgtaaatatatgtacaaagcagttgtttcttggtataaaacctcagccacatctctcattttataagtccactccttacccaataacttctcctactcacccctgccccagagcagccaagttcaaacacactgaatgtttgtagcccataggtgtgagcctttctagctcacactggcagggcatgttctattaaggcatcgtctggtatagtcaggccaagcagctgaccacagtgtcctctgaagtccgcggtgctcagcttcctaggatggagtgaatgggggttcacgacgtgtttggcacattgttggtttttctatgcctagggctgggactagaataggagacattgttgctacatatttctgatggacttgtaagacctgtgtcccagccctcctctccattgctactgcctgggtcatctgctggtgaagggtctgcctatctttctcttttgtgcaaggagactttccgggccagcttttcatgctctgtttcatccaccccctcaccctcctgctcatgtattcatatcaaacccatcgtcttacacagatgagcttcctaccccttccatgcctacaaagttccaagggattgcttaggagggaggagatgggaaatggctaaaatgcccttagaatcaagatgaagccagtaagtagggttgggagtgtgcatgtgggagcttgtatggcacaggatgcaatagtcaatacgctgtgctcatgtgcagtccccatggtggctctgcaagcattcccatcccatccccttccccacaagaacgggcctcagcttgacttgggtcaggctgtgtggttccacggccatcctcttccatcatactgccatgggaagaggctgagggccagcccgagcccctctgtagataaacgttcccccaagagccatttatgcggcataatttatagccatgcatctgtacagaatacttcataacttatagtaaatagtgacttgttttatagtgtctcatttggaaatgaggcagggttcttttatgtactgtgaacagaaagaacacctttgtatattttgtaatactgcctttaaacacaactctcgagggtcatgctacacctccccctgtaaatatgtaaggtacaccccaggaaggtgctttgccctctgttgattactttttttaaaaaaaatgggatctttgtttctgtgttaattgtatttttttaaaacgggttgagggaagggagaaatacgcacccccgcccccaagtactgcttccaattgcagggtgctgtaaacaagagaggtgtatttccttactcaaacctcaccatacaccaccatgggaagctgtagtttttggggttcccagtgacactgggacacagagaggacttagtcccaccttcactcagccttctctttccctggtcttgtggactagctactgagagctatgctaagtaaagcatagcattttgtggttaatgaatcttaccgggtttggaagctgatttttgaagctgtatgcaggttatcttttcagtcttgttttaaaaatcaattccacctgtaagagagaaggggaggggggcagtgagtgggatgtaaagtgaaaaagaaaaataaaaaatattaattccaatatggtaaaaaaaaaaa

SEQ ID NO: 1137 - DNA, 3573 bp, Rattus norvegicus
  Genbank Accession No. NM_053424
cctcacattcggtcgccaaactggaggagcgacggaagcccgatcccaggaggatggaggatgaagctgtcctggacagaggggcttccttccttaaacatgtgtgtgacgaagaagaagtagaaggtcaccacacgatctacattggggtccatgtgcccaagagctaccggagaaggagacgccataagagaaaggctgggcacaaggaaaagaaggagaaggaaaggatctctgagaactattccgacaaatcagatgtggagaatgcggacgaatccagcagcagcatcctcaagccgctcatctccccggccgcagaacgtatccgattcatcttgggagaggaagatgacagcccagcacctcctcagctcttcacggaactcgatgagctgctggctgtggatggacaggagatggaatggaaggagacagccaggtggattaagtttgaagagaaagtggaacagggtggggagcgatggagcaaaccccatgtggccaccttgtccctgcacagcttgtttgagctgaggacatgtatggagaaaggatccatcatgcttgaccgggaggcctcctctctcccacagctggtggagatgattgcagaccaccagatcgagacaggcctcttgaagcccgacctcaaggataaggtcacctatacgctgctgcggaaacaccgacatcaaaccaagaaatccaaccttcggtccctggctgacattgggaagacagtctccagtgcaagtaggatgttcagcaaccctgataacggtagcccagctatgacccacaggaatctgacatcctccagtctcaatgacatttctgataaaccagagaaggaccagctgaagaataaattcatgaaaaaactgccccgtgatgcagaagcttccaacgtgctcgttggggaggttgacttcttggacactcccttcattgcctttgttcgtctacagcaggctgtcatgctgggtgccctgactgaggtgcctgtgcccacaaggttcttgttcattctcttaggtccaaaggggaaagccaagtcctaccatgagatcggaagagccatcgccaccttgatgtctgacgaggtgttccacgatatcgcttacaaagcgaaagatagacacgacctgattgctggcattgacgagttcttagatgaagtcattgtccttccacctggggaatgggacccggcaatcagaatagaacctccaaagagcctcccatcatctgacaaaaggaagaatatgtactcaggtggagagaacgttcagatgaatggggacacacctcatgatggaggccacggaggaggaggccacggtgactgtgaagaactacagagaactggccggttctgtggtggattaattaaggacataaagaggaaagcaccattttttgccagtgacttttatgacgctttaaatattcaggctctctcggcaattctcttcatctatctggcgacggtaaccaacgccatcactttcggaggcctgctcggggatgccactgacaacatgcagggtgtgttggagagtttcctgggcactgctgtctctggcgccatcttttgcctttttgcgggtcaaccgctcaccatcttgagtagcacgggacctgttctggtgtttgagaggcttcttttcaacttcagcaaggaccatagttttgactacttggagtttcgtctttggattggcctgtggtcagccttcatgtgtctcatcctggtggccactgatgccagcttcctggttcagtacttcacccgtttcacggaagaaggattctcctctctgatcagcttcatcttcatctatgatgctttcaagaagatgatcaagctggcagattactatcccatcaactctgacttcagagtgggctacaacactcacttctcctgtgcttgcctgccacctgacccagttaatctctcagtatctaatgataccacactagccccagaggacctgccaaccgtttcttctactgacatgtaccacaatgctacctttgactgggcctacttgtcaaagaaagagtgtgtgaaatttggaggaaagctcgtgggaaacaactgtgacttcgtgcctgacatcacactcatgtccttcatcctcttcctgggcacttacacctcttctatggccatgaagaaattcaaaaccagccgctattttccaaccacagcaagaaaactgatcagcgattttgccatcatcctgtccattctcatattctgtgtaatagacgccctcgtcggtgtggatactccgaagctaattgtgccaagtgagttcaagccaacaagccctcaccggggttggtttgtcccaccctttggaggaaacccctggtgggtgtgccttgctgctgctatcccggctttgctagtcaccatcctgattttcatggaccagcaaatcacggccgtgattgtgaacaggaaagaacataagctcaagaagggagctggctatcacctggacctgttttgggtcgccatcctcatggtggtgtgctccttcatggctcttccctggtatgtggctgctactgtcatctccatcgctcacatcgacagtctgaagatggagacagagacttctgcgcctggagaacaaccaaagtttctgggagtgagagaacaacgagtcactggaacccttgtgtttattctgactggcctgtcagtctttatggctcccatcttgaagtttatccccatgcctgttctgtatggcgtgttcttgtatatgggggtggcctcactgaacggtgtgcagttcatggaccgtcttaagctgcttctcatgcccctgaagcatcaacctgacttcatctacctgcgccacgtccccctgcgccgagtccacctgttcacctccctgcaggtgttgtgcctggctctgctctggatcctcaagtccacagtggctgcgattatttttccagttatgatcctggccctggtagctgtcagaaaaggtatggactacctcttctcccagcacgacctcagcttccttgatgatgtcattccagagaaggacaagaaaaagaaggaggatgagaagaagaagaaaaagaagaaaggaagtctggatagcgacaacgacgattctgactgcccatactcagaaaaggtccccagtattaaaattccaatggacatcacggaacagcaacctttcctaagtgataacaaacccttggacagagaaagatcctcaacattccttgaacgccacacatcatgctgataaaattcctttccttgagtcactgggtttacccagtcctccaagatctccagtgaaagtcgtgcctcaaattagaatagaacttgagtctgaagacaacgattatctttggaggaacaagggaacagaaaccacgttgtaacctgttagtcattctcaaaactgacagttctgttgttaactgttctaattttttttttgtctatgtattttaaaaacttttgtttggtcactgactgaataatacagtcactctctctgcttctctcttgcataggta

SEQ ID NO: 1138 - DNA, 2037 bp, Rattus norvegicus
  Genbank Accession No. NM_053433
ctctttcagactttcgagaagactaggggtttagacacagagaagaaaggaagacaaataaaaggccaccatgaagaggaaagtggcagtcattggggctggtgtcagtggtctggctgccatcaggagctgtctggaggagggactggagcccacgtgctttgagaggagtgatgacgttgggggcctgtggaaattttcagaccacacagaagagggcagggccagcatttaccaatcggtcttcaccaactcttccaaagaaatgatgtgttttccagacttcccctatcccgatgactttcctaacttcatgcataacagcaagctccaagaatatatcacttcatttgccacagaaaagaaccttctaaaatacatacagtttgagacacttgtaaccagaatcaataaatgtcctgatttctcaaccactggcaaatgggaagttaccactgaaaagaacagtaaaaaggaaacagctgtctttgatgctgtaatgatttgttctgggcaccatgtatatccccatctaccaaaagactcctttccaggtctgaaccgtttcaaaggcaaatgcttccacagcagggactataaggagccaggaacatggaaaggaaaacgagtcctggtgattggcctggggaactcaggttgtgacatcgctgcggaactcagtcacgtggctcagcaggtcatcataagctccagaagtggttcttgggtgatgagccgggtctggaatgatggctacccttgggacatggtggtgatcacacgatttcaaacatttctcaagaacaacttacccacagccatttctgactggtggtatatgaagcagatgaacgcaagattcaagcatgaaaactacgggttgatgcctttaaatggaacactcaggaaggagcctgtgttcaatgatgagcttccagcccgcatcctgtgtggcactgtgtccatcaagcctaatgtgaaggagttcacagagacctccgctgtgtttgaggatgggactgtgtttgagggcattgactgtgtcatcttcgccacaggctatggttatgcctaccccttcctggatgacagcatcatcaaaagcagaaacaatgaggtcaccttgtacaaaggcatcttccctcctcaactagagaaaccaaccatggcagtgattggccttgtccagtccctgggtgctgccatccccacaaccgacctgcaggcacgctgggcagcacaagtaataagaggaacttgcattttgccttctgtaaacgacatgatggatgatattgatgagaaaatggggaagaagcttaaatggtttggcaacagcaccaccattcagacagattacattgtttatatggatgaattggcctccttcatcggagcaaagcccaatatcctatggctgtttctcaaggaccccaggttggccatagaagtgttctttggcccttgcagcccctaccagttccggctggtaggcccagggaagtggtcaggagccaggaacgccatcctaacccagtgggaccggtcactgaagcctatgaagacccgtgtcgtcggtggtattcagaaaccttgcttgtattcccattttctcaggctcctggctgttccagtgctcattgctttgttcctcgtgttgatctgattgagattccctctagaatgtctgcgagtcaccgacaataaccagacaagaactttgctatttaaaattaaggttttcatacctctccctttcctgttcaagatcatttgccagaactctagacatttattagtaagcaagacaatgttttgctctggccttgtaaataagtcacctttcagaatcatgctgacccgcagtgagcataagtcatttctcctaagttccactaacaatttgtaacaagaatggtatttttatggacaacttgaatcatctcctgaaagggttgaacagattccatttctcttttaaacgatgcttaaaagatatacttcagatctggacagggaataaagtacagcatttag

SEQ ID NO: 1139 - DNA, 4117 bp, Rattus norvegicus
  Genbank Accession No. NM_053442
gccaccctgccctcacagatggaacgatctgcggcgtgagcacggagctcggagcggacaagggcgagaaggggcgaccgcagcaggtggaaacctgatcgcgagccggcgagcgagaagaaagtacctgagcaccgctcctcctccgccctctcggctaacgagaactacttttaccctcgtggtaaaagagacttaagggaaggtggaggcgatctgtttcgttaggagggctgcagggaaattctgaccagagcaagccgccgcccggtacaccgagcagagccatcctgggcttctgaagataaacgctttccggagaattccagctggagtcgctggtacagttctatttttgtatttagatatatatgttctttgccttccatttaaaaagcacggcccttgtttgttagcagtgacacgtgtgactctcgtttgctgtcacttttagagcctaggagcgctcgctctccgtttctgaaaagggcgttctaattggaaacttgtttttccgcgtatctctgcatttatacgcacgagcgtttagaaagagactgctctttttagcttttggtggtcggaaccctacggagaaagatggaaaagggaacccgacagcgaaacaacaccgcgaagaaccacccggaccgcggatctgacaccagccctgaggccgaggctagctcgggagggggcggagtagccctgaagaaagagatcggattggtcagcgcctgtggtatcattgtagggaacatcattggctccggaatcttcgtctcaccaaagggtgtgctggagaacgctggctcggtgggccttgctctcattgtctggatcgtgacgggtgtcatcacggctgtgggagctctctgctatgctgaactaggtgtcaccatccctaaatctggaggtgattactcctatgtcaaggacatcttcggaggactggctgggttcctgcggctatggattgctgtgctggtgatctaccccaccaaccaagctgtcatcgccctcaccttctccaactatgtgctgcagccactcttccctacctgcttcccccctgagtccggcctgcgactcctggctgccatctgcctgttgctgctcacatgggtcaactgctccagtgtccgatgggccacccgggttcaagatatcttcacggctgggaagctcctggccctggctctgatcatcatcatgggtgttgtgcagatatgcaaaggagaattcttttggctggagccaaagaatgcatttgagaatttccaagaaccagacatcggcctcgtcgctctggctttcctccagggctcctttgcctacggaggctggaacttccttaattacgtgacggaggaacttgtggatccttacaagaaccttcctagagccatcttcatttccatcccactggtcacatttgtgtacgtctttgctaatatcgcctatgtcactgcaatgtccccccaggagctgctggcctcaaatgcagtcgctgtgacttttggagagaagctcctaggggtcatggcctggatcatgcccatttccgtcgccctgtccacatttggtggagtcaacggttccctcttcacctcctcccggctgttctttgctggagccagagaaggccaccttcccagcgtgttagccatgatccacgtgaagcgctgcaccccaatcccagcactgctcttcacatgcctctccaccctgctgatgctggtcaccagtgacatgtatacactcatcaactacgtgggcttcatcaactacctcttctacggggttacagttgcaggacagatagtccttcgctggaagaagcctgacatcccccgccccatcaagatcagcctgctgtttcccatcatctacttgctgttctgggccttcctgctgattttcagcctgtggtcagagccagtagtatgcggcattggccttgccatcatgctgacgggtgttcctgtatacttcctgggtgtctactggcaacacaaacccaagtgtttcaatgacttcattgagtccctaactctagtgagtcagaagatgtgtgtggtcgtgtatccccaggagggggactcggggaccgaggaaacaattgatgacgtagaggaacaacacaagcctatcttccagcctactcctgtcaaggacccagactcggaggagcagccctgaagactgccagcctttaactggccacccccccttcatcctttctgccctgtatccctgcctaggtccccccaacacacacacacacacacacacacacacactcacacacacacacacacacacacacacacacacacacacacacttctgttaggcaggggcaagacctgggtgtccacagcgagacattctaaacaaagaccctgacctttgtacccaaagaacctgcttccagcaccaaggcccatggtcaaggtcagtgcaccgggacctgcacacaccctaaggtttagaggagagtggaggtgccattggtaccctacagggcctttcctcctgggcccatgctctttaggtgcctctaagaaacctgggttcactactgtttcttctccctaaccctgagcccaggcaaagcctccactggaaaaaaggtagcatccccagtgagttagttggggaagacaactcaaattgtcaccattaacagtcagctggggagactcagatgtggcttcattcaccagggagccaaaaggcagagggctcacttctctttgccttctgcactctgtactaccacggctccactgcccagcctcgacctgagacccacaaagttccctttcaggatgcctcttccccacagagctaaggaccaagaaggaggactgcccccctcccccccagctctcagccaggcttgtggaatatatagggaaaggctcagactgcagaagccaagccctgccccacccctgcccctgcctcctgtcctcttgtggtgccaaagctccctgaagcagaaaaacttcttatattcagtctaacagacctatctctcttaagggcaaagcgactcagctcctccctgtccccctgtgtgaaagaaagagcagtagccctcttctcccagcagctctgcccactcacagatctgcctgccgtcctcctctttcctcccctggaccttggctcaaggaccaggtatgaaggatcccccaagtccttcaggcctgaagtaagagtcaacccagccttaagtcatctcccatccaagaactgggtctaaaacgttccccatttctaaccttcaagacagacctgatgttaaatccttccctggaaggaagggtgctttcccccttcccaggggtgctcatccctcaccctggggagaccatgttggtgaggtagggggagaatgttttctgaaggccagttcctctcccctcctccagctcaaaacaatctcaccgtcctcctgccatcccatttgggacaagatgacaggatggcactcactttggagacctcagaaaagccccttccaggagagctgctggtctgtgctgtacaggaagggtgacagcatctgccttctcctggcagcctccacacctgctgtgcttaggacaggatcctttgatcacaaagcagaaccctaatcctgttccatctactcaaactggaacacccaggggccttttcctggtctcccaacttcccacctagctcaccctacccctaactggtgagaggctgagtttgggctgaattgtggcccttcagaatacagtccaggcaggctgtggggcctctgggggggccagggaccacccctctacccctttcctcccattccttcagcctgcacctgcccctccttgaattattgtctctctctctctttttttttttaagtggatgccttactttttggataactatttttgaagctggtatttctatttcttttggattttttaatgtatggtggtttgggggcagagctagaaccttaatcgtctgtcgctgagttcatttaggttttaaattttattggtttgttttatggagtattttcttttctcgtaataaaattttaaatggaaatgaaaaaaaaaaaaaaaaa

SEQ ID NO: 1140 - DNA, 291 bp, Rattus norvegicus
  Genbank Accession No. NM_053485
cagtggtcagtcatggcatgccccctggatcaggccatcggccttctcgtggctatcttccacaagtactctggcaaggagggtgacaagcacaccctgagcaagaaggagctgaaggagctgatccagaaggagctcaccattggtgctaagctgcaggatgctgaaattgcaaggctgatggatgatctggaccgtaacaaggatcaggaagtaaacttccaggagtatgttgccttcctgggggccttggctttgatctacaatgaagctctgaaataaaatgggaag

SEQ ID NO: 1141 - DNA, 1194 bp, Rattus norvegicus
  Genbank Accession No. NM_053487
agagagagagagagagagagagagagagagaacccacccacccggcgactaatctgatcccggctgtcccccgggaccagcgaggtcccagaagacccacgagggagcgggcgtaacgcgtggctgcgggtgggagccatggacgccttcatccgagtcgccaaccaaagccaaggtcgggaccgacttttcagagccactcaacacgcatgcatgttgcttagatatttgttagagtctaaggctggcaaagaggcggtggtaacgaagctcaagaatctggagactagtgtgagcactggccgtaaatggttcagactaggcaacgtgctccatgccatccaggccactgagcagagcatccaagccactgaccttgtgccccgcctatgcctaacattagccaacctgaaccgcgtggtttattacatctgtgacactgtcctctgggcgaagagtgtgggtctgacatctggaatcaacagagagaagtggcaaatgcgggcggcccgccactactactatttcctcttgctgagcctggtccgggatctgtatgaggtcttgctgcatatgggacaagttgcacgcgacagagcaaagagagagaagtcctccggggaccctcctaagtacagcgtcgctaatgaagaaagtgaatggctccagtccttcctcctcctcctcttccagtctctaaagcgaaatccgcccttattcctggacaccgtgaagaacttctgtgacatcctgatccctttgaaccagctcgggatctacaagtccaaccttggcgtggtaggatttggaggtctcgtgtcctctgtggctggcctcatcactgtggtgtatcctcagttgaaactgaaggcccgctagggtgtttggaaaatttaagactgacgttcagtggagcaaacatttgcttttgtcatgatgtctactgtacttaattttttttaatcatgtgagcatcttaccaaccggtgatgtgagcagaggtaggacccacaacggagcctgaagactgatgacgtttttgtaaacacggcagtaacttctgcacatttccccttcagtgacttctgactactgcaaaaacatttgtgccgtcattgaagacgtgtaaaggggaagtcagaacattgctgagcatcttttctgtacatagtaagagctcatatatctaacaaa

SEQ ID NO: 1142 - DNA, 3730 bp, Rattus norvegicus
  Genbank Accession No. NM_053543
gaattccggtctgaatgttgtgtgaaaagagaggaaagatgggctcttcaagactcttggacttctagaaagtcagcttttgagcctaatttttggtagatctcattacagcgtgggctctctctctctctctctctctctctctctctctctccatccctcccttcaagccctcccctgcatctcagccggagcctctccgaaccggcgctgatcgatgccgagactccccagggaccctatcgcgactccatcgtgccatatctcgacatcaccgtaccctgtcgagactccattttgtcacaacccctttcaatatttatctattatatatatttttaaaatttgccctatcatatttgggggctgtccccttcatgtcgtgatttcgctgtgatctctccgtgacatcaccgcgccatcgtgaagtgtgatctcatcgctgccctgtcgttcgacttcatcaatgtcgtgttgtgacctggctgcggcgggacagttgggcaaggcgggcatcatggcctcggattgtgagccagctctgaaccaggcagagagccgaaaccccaccctggagcgctacctgggagccctccgtgaggccaagaatgacagcgagcagtttgcagccctgctgctagtaaccaaggcagtcaaagcaggtgacattgacgccaaaactcgacgtaggatctttgatgctgttgggttcacctttcccaaccgactcctgactactaaggaggcccctgatggctgccctgaccacgttctccgggccctgggcgtggccctgctggcctgtttctgcagcgaccctgaactagccagccatccccaggtcctgaacaagatccccatcctttgcacattcctgacagcccgaggggatcctgatgatgctgcccgccgctccatgattgatgacacctaccagtgcctgacagctgttgcaggcacaccccgagggccccgacacctcattgctggtggcacagtgtctgccctgtgccaggcatacctggggcatggctatggctttgaccaggccctggcactcctggtggggctgctggctgctgcagagacacagtgctggaaggaggcagagcccgacctgctggctgtgttgcgaggcctcagcgaggatttccaaagagctgaagatgccagcaagtttgagctctgccagctgctgccccttttcctgcccccaacaactgtgccccctgaatgccaccgggatctgcaggctgggctggcacgcatcctaggaagcaagttgagctcctggcagcgcaatcctgcactgaagctggcagcccgcctggctcatgcctgcggctccgactggatcccagtgggcagctctgggagcaagtttctggccctcctggtgaatctggcctgcgtggaggtgcgactggctctcgaggagacaggcacagaggtgaaagaagacgtggtaactgcctgctatgcccttatggagttggggatccaggagtgtacccgctgtgagcagtccctgctgaaggagccccagaaagttcagctcgtgagcatcatgaaagaggccatcggagctgtcattcactacctgctgcaggtggggccagagaagcagaaagagccctttgtgtttgcctctgtacggatcctgggtgcctggctggcggaggagacctcatccctgcgtaaggaggtgtgccaactgctgcccttccttgtccgatatgccaagacactctatgaggaggctgaggaggccagtgacatttcgcagcaggtggctaacttggccatctctcccactacaccagggcctgcttggccaggggatgctctccggctcctccttcctggctggtgccacctgactgttgaagatggtccccgggagattttgatcaaggaaggagccccctcacttctgtgcaagtacttcctgcagcagtgggaactcacatcccctggccatgatacctcagtgctgccagacagcgtggagatcggcctacagacctgttgccacatcttcctcaacctggtggtcaccgctcccgggctgatcaagcgcgacgcctgcttcacatcccttatgaacaccctgatgacgtcactgccctcactagtgcagcagcaaggaagactgcttctagctgccaacgtggccaccttgggcctcctaatggcccggctccttagcacctctccagctctccaaggaactccggcctcccgaggtttcttcgcagctgccatcctctttctgtcacagtcccatgtggcacgggccacccctggctctgaccaggcggtgttggccctgtcccctgactatgagggcatctgggccgacttgcaagagctctggttcttgggcatgcaggccttcacaggttgtgtccctctgttgccctggctggcccctgccgccctgcgctcccgctggccacaggagctgctacagctgctaggtagtgtaagccccaactctgtcaagcccgagatggtggctgcctaccagggcgtgctcgtggaattggcgcgggcaaaccggctatgccgggaggccatgaggctgcaggcgggtgaagaaacagccagccattaccgcatggctgctttggagcagtgcctgtcagagccctgaggggcatccagtgggtatagacccaggggcgggcagcgagggaaggagggaggaggcatcttccctgaagcccccaaactggaccccttcttcagacccccacaaacaccccagctttctggcttttctgagggctagggcgtgatgcccacctctcaagtataagaaactgcatcctgcctccagcccccttggggcagggattggcttggaacagaggttggccccgccaggccggggaaggttggagaagtccccaggaagagggcaactaagtgtcattatacccagcgtctggctccctgacaggagggaggtcccagggtaggagcgggctggcaggcgcagactgcctcagcccatgtgccctgccggccagggcgtggcctccccaaggctgtggtgccccttctggctcccccaggccaggtccgcgccctttaaattggccgtttggcttttgcttcggtccttttggacagagagcaggctcaggccattgacatcacagttcttcctttcaactctagtgacccggggtccgagttgcccctatgcttccagggcaatttggagcagacagaccagtggggggcggggaacctccttccacctgcgcttccttgaggggaccggagtgcccttggtcccaggtctcttcaccttttgtgtcatgttgcagcagagtgaagatgggggttgggggttatttattttgcttgtccttatctctgcttggacacctgagcatcagctccctgtgcccctgctcccatctggcctggctggagccaggaacaggaggtcacatcaccctagaatccccatgttttccctgtgattgcactccactgccaccgtggtgcctggcttcagttcccctcccccccgtccctgctaagactcttctctgcagggagacgcgactggcggctccagcaggaactacctttctgaacccgtggagacccgcatacacctgaccccttgcttccgcccctccccccagtgcgttctgtgatcgccaagttcaaagctgtgcacatgtggacactcaataaatgtttattggtg

SEQ ID NO: 1143 - DNA, 309 bp, Rattus norvegicus
  Genbank Accession No. NM_053555
atggcagggaaagaattggagcgatgccagcggcaggcagaccaagtgacggaaatcatgctcaacaatttcgacaaggtcctggaacgcgatgggaagctgtcagagttgcagcagcgctcagaccagctcctggacatgagttctgccttcagcaagacaaccaagactttagcccagcagaagcgctgggagaatatccggtgccgggtctacctggggctagccgtggctggcggccttctcctcatcctggttgtgcttctggtcatctttcttccgagtggagaggacagtagtaaaccatag

SEQ ID NO: 1144 - DNA, 1511 bp, Rattus norvegicus
  Genbank Accession No. NM_053563
tgggctcaaggaaggaagcgttgtagctcgcgtccaggggcgcggcgtgtacgggtggctctcttcgcagctcgcggaggcgaaccgggcaacagtgacatggcagaacaggatgtggaaaatgagcttttggattatgatgaagatgaagagccccaggtaccccaggagagcactccagctcccccgaagaaagatgtcaaaggatcttatgtctccatccacagttctggcttccgggactttctgctgaagccggagctcctgagagctatagttgactgtggctttgaacatccttcagaggtccagcatgaatgtattccccaggccattctgggtatggatgtcctgtgccaagccaagtctgggatgggcaagacagctgtgtttgtgctggccaccctgcagcagattgaacccatcaatggccaggtatcagtactggtcatgtgccacacaagggagctggccttccagatcagcacggagtatgagcgcttctcgaagtacatgcccagtgtcaaggtatctgtgttctttggaggcctctccattaagaaagatgaagatgtgttaaagaagaactgtccccatgttgtggtggggacaccaggccggatcctggccctcgtgcggagcaggagcctcaacctgaggaatgtgaagcactttgtgctagatgaatgtgacaagatgctggaacagctggacatgcgccgggatgtacaggagatctttcgtctgacaccccatgagaagcaatgtatgatgttcagcgccaccctgagcaaggagatccggccagtctgcaggaagttcatgcaggatcctatggaggtgtttgtggacgacgagaccaagctcacactgcatgggctgcagcagtattacgtcaaactcaaggacagtgagaagaatcgtaaactcttcgacctccttgacgtgctagagtttaaccaggtggtgatctttgtcaagtctgtgcagcgctgcatggccctggcccagctcctagtggaacagaattttccggctatcgctattcacagaggcatggcccaggaggagcgcctgtcccgataccagcagttcaaggacttccagcgtcgcatcctagtggctactaatctgtttggcagaggcatggacattgagagagtcaacatcgtcttcaactatgacatgccagaggactcggatacctacctgcaccgagtggctcgtgctggtcgctttggtaccaagggtctggcagtcacttttgtgtcagatgagaatgatgccaaaatccttaatgacgttcaggaccggtttgaagtgaatgtggctgagcttccagaagaaatagatatctccacatacattgagcagagccggtaaccatgtgtgtagccaggcacatggctttctctcctgctgcttcagatcctcctcctaggtggcaatcggcggcctctctttttattgttccaaagctttagctatgttaagaataaacttttattgtg

SEQ ID NO: 1145 - DNA, 1414 bp, Rattus norvegicus
  Genbank Accession No. NM_053576
gcgcctccttgttcccagcgtcaccactgccgccatgcccggagggctgcttctcggggacgaagcccccaactttgaggccaataccaccatcggccacatccgcttccacgatttcctaggagattcatggggcattctcttttcccacccacgggactttaccccagtgtgcaccacagaacttggcagagctgcaaagctggcgccagagtttgccaagaggaatgttaagttgattgctctttcaatagactctgttgaggaccattttgcctggagcaaggacatcaatgcttacaatggtgcagcacccacagaaaagctaccatttcccatcatcgacgataaggacagggaccttgccatcctgttgggcatgttggatccagcagagaaggatgaaaaaggcatgcccgtgacagcccgtgtggtattcatttttggccctgacaagaaactaaaactgtccatcctctacccagccaccacgggcagaaactttgatgagattctcagagtggttgactccctccagctgacagcatcaaatccagttgccactccagttgactggaagaagggagagagtgtgatggtccttcccaccctccctgaagaggaagccaaacaacttttccctaaaggagtcttcaccaaagagctcccatctggcaagaaatacctccgttatacgccccagccttaagtctgcgggaactggggctgcaactgctcgaccagcactgggacctgaggatgacagctgacagctgcagttccgtagaaagattgtggcgtggtcacagccgaagtcgcgtaggtcgctcgctatactactggctcattaaatggaaatggcaccaaaacattctcgggattctttactctgtgccttcgccagcattctgcccctccatccatcacagcgccctgctgactggctttctttgaaacgaattatgtgttggtgactgcagggtctctgcagggtctgtgatcagcaaggtagtgtcagtgtgggctccatgctagaatgataaacatcttttgtaggtttccaaactgaatcttctgttacccattgtggagaaccataaagtggggagaaactttcaattctgtactttcagtaaataaagcaggggaggtggggggggggggagagttctctataggaaatccatggtgagtttctatcaaagtgggcttccaagaatgtgtggaagacagcacatgtacttcctggagtttccaggtctgctctctagtgatctgtgaatgtgaactcgccttatgaaagacaggcagtgacattgtttgccactaaatgtcctaaaggagtgggttgccatttctaaattctgctgtgtgaggttcaacaataaaatcctgattagaaaaaaaaaaaaaa

SEQ ID NO: 1146 - DNA, 1869 bp, Rattus norvegicus
  Genbank Accession No. NM_053582
ccaccatgtggggatgtccgctagggctgctattgctgctgctggctggccaggctgccctggaggcccggcggagtcgttggcgcagggagctggcgccagggctgcacctgcggggcatccgggacgccggtggcagatactgccaagagcaggacatgtgctgccgcggccgtgctgacgagtgtgctttgccctacctgggagccacctgttactgtgacctcttctgcaaccgcaccgtctctgactgctgccctgacttttgggacttctgcctcgggattccaccccccttccctcctgtccaaggttgcatgcatgcgggccggatctacccaatcttcggaacctattgggaaaactgcaatcggtgcacctgccatgagaaagggcagtgggaatgtgaccaggagccatgtctagtggacccagccatgattaaagccatcaaccggggcaactacgggtggcaggctgggaaccacagtgccttctggggcatgaccctggatgagggcattcgataccggctgggcacaatccgcccatcttcctctgtcatgaatatgaatgaaatttatacagtgctgggacaaggagaagtgctacccactgcctttgaggcttccgagaagtggcccaacctgatccatgagccgctggaccagggcaactgtgcgggttcctgggctttctccacagcagctgtcgcatctgaccgagtgtccatccattctttgggacacatgacacccatcctctcaccgcagaacctgctatcctgtgatacccaccaccagaagggctgccgaggtgggcgtctcgatggtgcttggtggttcctgcggcgccgaggggtggtgtctgataactgttacccattctccggccgtgagcagaacgacgaggccagccccactcctcgatgcatgatgcacagccgcgccatggggcggggcaagcgccaggccacttctcgctgccccaatagtcaggttgattccaatgacatctaccaggtcacgcctgtctaccgcctggcctccgatgagaaggagatcatgaaggagctaatggaaaatggccccgttcaagcgcttatggaagtacacgaagacttcttcttgtaccagcgaggcatctacagccacacacctgtaagccaggggaggccagagcagtaccgccgacacgggactcactctgtcaagatcacagggtggggagaagagacactgccagacggaaggacgatcaagtactggactgctgccaactcgtggggcccatggtggggtgagaggggccacttccgaatcgtgcgtggcatcaacgagtgtgacatcgagaccttcgtgctgggcgtctggggccgcgtaggaatggaggacatggggcaccactgagtctcggccactaagctaggtgggatccacagccacggaagaggccttgggggccacgccgatgaggccttgggaccaggtgctaatcccctcagactcagatccacacaaacgcagaaccccacctgggagctaatgtccctcagggagcaacagtgaggctggagggaaccctcagacatcacagccggaactggaaagggcccggcttggaaactgcagggagtaaaattcccaggcccctggtcagccagcccaagaccatgggagctaagacaccccaacctctttatcctcctacccaacctcattcttattttttcattctctttggtggattctgcccatccccctggcctccgttctggctggacctttccatcctcaacactgctttcttactctttaaaaatatttatttttcttttcattaaaataaaaccaaagtattgataattgc

SEQ ID NO: 1147 - DNA, 774 bp, Rattus norvegicus
  Genbank Accession No. NM_053589
gccaccatggcaactacaccgtacaactactcttacatctttaagtatattattatcggggatatgggagtaggaaaatcttgcttgcttcatcaatttacagaaaaaaagtttatggctgattgtcctcacacaattggtgttgaatttggtacaagaataattgaagttagtggccaaaaaatcaaactgcagatttgggatacagcaggacaggagaggttcagagctgttacacggagctactatagaggagctgcaggtgcgctcatggtgtatgacatcaccagaagaagtacatataaccacttaagcagctggttgacagatgcaaggaacctcaccaacccaaacactgtaataattctcataggaaataaagcagatttggaagcacagagagatgttacctatgaagaagccaaacagtttgctgaagaaaacggcttattgttccttgaagcaagtgcaaaaacgggagagaatgtagaagatgcttttcttgaggctgccaagaaaatctatcagaacattcaggatggaagcctggatctgaatgctgccgagtctggtgtacaacacaaaccctcagccccgcagggaggacggctaaccagtgaaccccaaccccagagagaaggctgtggctgctagtgacctctttgctctggtccctcattttgacctttcacctcttgtctgttggaagcagtactttttactgccttcttgtcttctgtacatcttactggggtttaattaaaaaaaaaaaaa

SEQ ID NO: 1148 - DNA, 952 bp, Rattus norvegicus
  Genbank Accession No. NM_053592
ggcctccagcgccatgccgctcttgtgcgcgctgctgcgcagccgactccaaccttctctgctccgctcgcttacgctcacgtccgcgcaaagcctaagctgcggcggaagcagaggagtccggacctggagcgcgcggaccggacccggagcgtgcgctgaccctgcggtctctgtctctaagagggctcgagcggaagatgacgcttctctgcgtttcgtgcggctctcggagcacgctacggctcccacccgcgggtccgcgcgcgctgcaggctacgacctgtacagtgcctatgattatacaattccatccatggagaaagcccttgtgaagacagacattcagatagctgttccttctgggtgctatggaagagtggctccacgttctggcttggctgtaaagcacttcatagatgtaggagccggtgtcatagacgaagattatagaggaaatgtcggcgtcgtgctgttcaattttggaaaagagaagttcgaggtgaaaaaaggtgaccggatcgcgcagctcatttgtgagcggattctttatccagacttagaggaggtgcaaacactggataacactgagagaggttcaggaggcttcggctccacgggaaagaattaaaactttgcttgaagtactttgctgtttgaacactgtaaacgagctttaatttcagaagcattttgtgttctaggatgtaggaaaggatacctatcacggtggaactgctctgttctctagttgatggttgcctgtaaatctgtatcgtgagaactggcagtgacatgcagacttggttattagatattttttttaaatttggtattgtatttaaattatagtcctataagaactgattttgctctaattgctatattatttgtaattttttttttttatccaataagtccgaagtctttagcgaaaaaaaaaaaaaaaaaa

SEQ ID NO: 1149 - DNA, 573 bp, Rattus norvegicus
  Genbank Accession No. NM_053602
gcttcctgtccggtgagcgtcgaacgactgaagcggtggcccatagtgcattgcgatggcgggtaggcgtgtgtaggcggagccagggccggaagtagaacggtggcggcggcggtgactctggcagctcgggactcagtgcaagtaccacagactcaaccatgactgttcagaggatcttcaggctctcctctgtccttcggtcagcagtctctgtgcatttgaggaggaacattggtgttacagctgtggcgtttaataaggaacttgatcctgtacagaaactcttcttggacaagataagagagtacaaagcaaagcgactggcgtctggaggacctgttgatactggcccagaatatcagcaagaggtggacagagagctttttaagcttaaacaaatgtatggtaaaggagagatggataagtttcctaccttcaattttgaggatcccaaatttgaagtcctcgacaaaccccagtcctgaggaacatacaaaccatgtggtaatttgtcatgacttagttgtacaattaatctaaaaaattcaaataaacattcacttcacagct

SEQ ID NO: 1150 - DNA, 2454 bp, Rattus norvegicus
  Genbank Accession No. NM_053607
gacggaggcagctgaatgtggtgctgaaccaacaacatctagctacaaggggagccactcctccacccagcgactgtgactgttctcacaggtctgaatttcctgttggtattcacaaagatgctttttatttttaacttcttgttttccccacttccgaccccggccctgatctgcctcctgacatttggaacggctatcttcctgtggctgatcaacagacctcagccagtcttacctctcattgacttggacaaccagtctgtagggattgagggaggagcacggagaggcgctttccagaagaacaatgacctaatcctttattacttctcagacgccaagacgttgtatgaagttttccaaagaggacttgctgtgtctgacaatggaccttgcttgggatacagaaagccgaaccagccctacaagtggatatcctacaagcaggtgtctgatcgagcagagtacctgggctcctgtcttttgcataaaggatacaagccatcgcaggaccaatttattggcatctttgctcaaaataggccagagtgggtcatctccgagttagcctgttacacatattccatggtagctgtccccctgtatgacacactgggagcagaagccatcatctatgtcatcaacagagctgatatctccgtggtgatctgtgatacaccccaaaaagcaacaatgctgatagaaaatgtggaaaaggaccttaccccaggcctgaagacagtcatcctcatggaccctttcgatgatgacctgatgaaacgaggagagaagtgtggcattgagatgttgtctctgcatgatgctgagaatctaggcaaagagaacttcaaaaaaccaatgcctccgaacccagaggatctaagtgttatctgtttcaccagtggaactacaggtgaccccaaaggagctatgctgacccatcaaaatatcgtttcaaacatggctgctttcctcaaatttctggagcctatcttccagcccacccccgaggatgtgaccatatcctaccttcccttggcccatatgtttgagaggcttgtccagggtgtcatattttcctgtggaggcaaaattgggttcttccaaggagatatccggttgctacctgatgacatgaaggctttgaaacccacagtgtttcccacagtgcctcgactccttaacagggtctatgataaggtacaaaatgaagccaagacacctttgaaaaagttcttattgaacttggctatcatcagcaaattcaacgaagtgagaaatggcatcattcggcggaacagtttgtgggacaagctcgtgttttcaaagatccaaagcagcctgggtgggaaggttcgtctcatgatcactggagccgcccctatctccactccagtcttgacgttcttcagggctgcaatgggatgctgggtgtttgaagcttacggccaaacagaatgcacagctgggtgttccattacatcacctggggactggacagcaggtcatgttgggactccggtgtcctgcaattttgtcaagctggaagatgtggctgacatgaactacttttcagtaaacaacgaaggcgagatctgcatcaaaggcaacaatgtgttcaaaggctacctaaaggacccagagaagacacaggaagtactggacaaggatggctggcttcacactggggacatcggtcgctggcttccaaatggaactctgaaaatcattgaccggaagaagaatattttcaaattggcacaaggagaatacatcgctccagagaagattgaaaatgtttattccaggagcagaccaatattgcaagtttttgtccatggggagagcttacggtcattcctgataggagtggtggttcctgacccagagtcacttccctcatttgcagccaagatcggggtaaagggatcctttgaagaactatgccaaaaccagtgtgtaaagaaagccattttagaagatttgcagaaagttgggaaagaaggtggccttaaatcctttgagcaggtcaagagcatctttgtgcatccggagccgttctcaattgaaaacgggcttctgacaccgacactgaaagccaaacgagtggagcttgccaagttcttccagacacaaatcaagagcctctatgagagcatcgaagagtaacttaaggttgctgagctggaagcggtgggggacgaagcggaaactatgtccagcgaacttttccagtaaatgaagcaatcactaaaggactgtcctgagttgggagcaaagcaacgtggacgagctcgatgtgacgcctgcactgcaggcgtcttctgtgatggaagctctggatctttctccttggacttcagtccctgcagtattttgctgccagatagcatgtggtgcctctacctgtaaatgtcagatctttgaaataaactattacagctcgtgccg

SEQ ID NO: 1151 - DNA, 602 bp, Rattus norvegicus
  Genbank Accession No. NM_053611
gagggcagacatttggaaaacaggcaagactttggagaaagcagaccaggtatgatggccaccttgccaccaacagcccacacttcccagcaacctgtaaacatagaggacgaagatgggatcctggatgagtatgaccagtacagcctggcccaatcttatgtcgtcggtggaggtcggaaaggacgtaccaagagagaagctgctgccaacaccaaccgccccagccctggtgggcatgagaggaagctgctgaccaagttccagaactctgaaaggaaaaaggcctggcgctgagacagagctggagatgaggccagaccacggacaccacacccagcaatggatacaggaccttggagaaattaggagttgtaagcaggacctaggcctgcttgattctttcccacctaagtgaggctctggagagggaacaccaaaaaaagcccttccggacccagctaaagggcaagttaggagcgagaagcagagggtagatgggcagagctaagaaggcacccccaaaaagaacagtgggaaaaactggatgcccttgggtggcagtaacaataaactgtacaacagtgacagcaaaaaaaaaa

SEQ ID NO: 1152 - DNA, 2412 bp, Rattus norvegicus
  Genbank Accession No. NM_053616
agagctgttggtccaagatggcggctgccgcggggcctgtgggcgatggggagctgtggcagagctggcttcctaaccacgtcgtgttcttgcgactccgcgaaggtctgaaaaaccagagtccagccgaagcggataaaccagcgacttcgacttcaccttcatgcccgcctctgccgccgcatttgccgacgagaaacctggtcttcggcctcggaggggaactgttcctgtgggacgcagaaggcagtgcctttttggtggttcgccttcgaggccccagtggtggcagcgtggagccccctctctcccagtatcagagattactttgcattaatccacccttgtttgaaattcatcaagtcttgttaagtccaacacaacatcatgtagcacttataggaacaaaaggacttatggcattagaattacctcagagatgggggaaggattctgaatttgaaggtgggaaagcaactgtgaattgtagcaccatcccgattgctgagagatttttcaccagttctacctctctgactctgaagcatgctgcatggtatcccagtgagatgctggatccccacatagtgctgttgacgtcagacaatgtgataagaatttactctctgcgtgagcctcagacaccaactaaggtgattgtactttcggaagcagaagaggaaagtttaatactcaataaaggaagagcatacacagcatctctaggagagacggcagtggcgtttgacttcgggcctctggtgaccgtctcaaagaatatgtttgaacagaaagacagagaagcagtggcgtatccactgtacattctgtatgagaacggggagaccttcctcacctacgtcagcctgttacacagcccagggaatattgggaagctgttgggcccactgcctatgcatcctgcagctgaagataactatggttacgatgcctgtgctatactctgtttgccctgtgttcccaacatcttagtcattgcgactgagtcaggaatgctgtaccactgtgttgtactagagggagaagaagatgacgatcaaacgttagaaaaatcctgggatcccagggccgacctcatcccttctctgtacgtgtttgagtgtgttgagttagaacttgccctgaaactggcgtctgcagaggatgatccctttgcttctgacttttcctgtccaattaaactgcatagagatcccaagtgtccttcgagataccactgtagccatgaagctggcgtacacagcgttgggctgacttggattcacaaactgcacaaattccttggatcagatgaagaagacaaggatagtttacaggagctcactgctgagcagaaatgctttgtggagcacattctttgtacaaagccgttgccatgcaggcagccagctccaattcgaggattctggatcgtcccggatatcctggggcccacaatgatctgcatcaccagtacctatgaatgtctcataaggcctttattaagtacagtccacccagcatctcctcccctgctctgcacccgggaagatgctggagtggcagagtctccactgcgcatcctggcggaagccccagactcctttgagaagcatattaaacgaatcctgcagcgcagcgccgccaacccggcacttctcaagtcatctgagaaggacttggctccccctcccgaggagtgtcttcagctgatcagcagggccacccaggtgttccgagaacagtacatcctcaagcaggacctggccaaggaggagattcagcggagggtcaaattattatgtgaccagaagaggaagcaactagaagatctcaattactgtcgagaggagagaaaaagtctccgggaaatggccgagcgcttagctgacaaatatgaagaagccaaagaaaaacaagaagatatcatgaacaggatgaaaaaagtgcttcacagttttcacactcagctcccagtcctctcggacagtgagagagacatgaagaaagagctacagctgatacctgaccaacttcgacatctaggcaatgccatcaaacaggttactatgaaaaaagattatcaacagcgaaagatggaaaaagtgctgagtcctcagaaacccaccattactctcagtgcctaccagcgaaagtgcattcagtccatcctgaaagaagagggtgaacacatacgagaaatggtgaagcaaatcaatgatatccgaaatcatgtcaacttctgacaccacctgaagttaaggacagctgaaggcttacaagcccgtgctgcagaacaagcaggcagcataatctaatttataaagacgaatttggataaactatggtgtggttattcttttgttattccttttgttttataatacttgaataaatttttattcaaaattt

SEQ ID NO: 1153 - DNA, 2573 bp, Rattus norvegicus
  Genbank Accession No. NM_053618
cctcgcacactttatccgctgctaggcaaccggcctgccaagctgccaaccttgcgcctgcgtggggagtctgtcttccgcccctagctggcgccatcatgctgctgcctgtgttcaccctgaaactgcgccacaaaatcagcccccgcatggtggccatagggcgctacgacgggactcacccgtgcttggcggccgccacccaagcgggcaaggtttttattcataatcctcacatgcggagccagcattttagtacatccagagtgttccagagccctcttgagtctgatgtgtccctcctcaacattaaccagacagtcagctgcctcggcgccggagtcttgaaccctgagcttggctatgatactctcttagtggggacacagaccagtcttttggcttacgacatctacaataattcagatttgttctacagagaggtcgcggatggggcaaatgcccttgtgttggggactctgggggacattgccccgccccttgcaatcatcggtggaaattgtgctcttcagggttttgatcacgaaggaaatgacctcttttggacggttactggagacaatgttcattccttggctctgtgtgactttgacggtgatgggaagtcagagcttcttgttgggtctgaagattttgacattcgagtttttaaagaagatgagattgtggcagaaatgacagagacagagatagtcacctctctgtgtcccatgtacggcagtcggtttggttatgccctttctaatggcacagttggagtttatgacaaaacagcccggtactggagaattaaatccaaaaaccatgccatgagcatccatgcttttgacatcaattctgatggagtgtgtgaattgatcactgggtggtctaatgggaaggttgacgctcgcagtgaccggaccggagaggtcatatttaaagacaacttctcttctgccgttgctggtgtggtggagggagattaccggatggatggccacgtacagttaatctgctgctcagtggatggggaaatccgaggctacctgccaggcacagctgagatgaaggggaacctcctggacacaagtgtggagcagggcctgatccgagagctcagtcagaaaaagcagaacctgttgctagaactgcgcaactacgaggagaacaccaaggcagaactgagcagtcccctgaatgaggccgatggacagaaaggcataatcccagccaataccaagctccacacagccctctcagtcaatctggggaatgatgcacaagacgcacatgcggaattacgcatttccacttctaatgacacaatcatccgggcagtactcatttttgcagagggaatttttgcgggtgaaagccacgtggtccaccccagcactcacaacctttccagctccatccgggtaccaattacgcctcccaaagatgtccctgtggatctgcacttgaaaaccttcgtgggttacagaagcagcacccagttccatgtgtttgaactgataaggcagctgcccagatttaccatgtatgcactgacaagcccagacgcagcgagcgagcctgtcagtttcgtgaacttcatcgtagtagagcgggcacagaggatggtcacgtggctcaaccagaacttcttgttgccagaagacagtaacattcagaacgccccgtttcacgtctgtttcacgtccttacgcaacggtggccagctctacataaaaatgaaaccaagtggtgagatcacggtgaatactgatgatattgatcttgctggtgatatcatccagtcgatggcatccttttttgctattgaagaccttcaggtagaagcagatttccctgtctacttcgaggagttacggaaagtgctgttgaaggtagatgagtaccattcagtgcatcaaaagctcagcgccaacatggctgataattctaacctcatccgaagtttgctggtcagagcggaggatgctcgtctgatgagagacatgaaaacaatgaagactcgttatatggagctctatgaccttaataaagatttgctaaatggatataagattcgttgtaacaaccacactgaactgctaggaaacctgaaggcggtgaaccaagcaatccagagggcaggccgtctgcgagttggaaagccaaagaaccaggtgatcagtgcttgtcgggatgcgattcgcagtaacaacatcaacacactcttcagaatcatgcgggtggggactgctccttcctaggagacaggcgagaggaaggaagctgcgaaaggtttgtgtctagacatggaggctggcttgctcccagtcccatcttgatgaatggagattgctaaggatgaaaccatgctaacgaacacaactgaagacagagcaccccatctgaaagtctcctcgtctgacgtcagtattgatgagagagtgagactaaaagtaactatttccccatttcagagtttaacttgtttctgtacataaagttagtgtatgaatttatctcccccttgaaattgtaactgaaatttaaagtggaatatttactttttcatt

SEQ ID NO: 1154 - DNA, 4862 bp, Rattus norvegicus
  Genbank Accession No. NM_053623
gccgaggctcgcccctccttgcaaggctgctccagagctagcgggcacgcgagctcctctccgggagcttccttccccgaaaggccgggacccagtggcggactcgtggtgagcgaggcagcaccttcgatcccaggagattgacctgttcttaaaagtgaaagaagaaatctaagaaaaacgctatggcaaagagaataaaagctaagcccacttcagacaaacccggaagtccatatcgctctgtcacgcacttcgactcactagctgtcatagacatccctggagcagatactctggataaattatttgaccatgctgtagccaagtttgggaagaaggacagcctggggacccgggagatcctgagcgaagaaaatgaaatgcagccaaatggaaaggtttttaagaagttaattcttgggaattataaatggataaactatcttgaagtgaactgccgagtgaataactttggaagtggcctcactgcactgggactgaaaccaaagaacaccattgccattttctgtgagaccagggcggagtggatgattgcagcgcagacctgctttaagtacaactttccgcttgtgactttatatgctacccttggcaaagaagctgtcgttcatggattaaatgagtctgaggcttcctatctgattactagtgttgaacttctggaaagcaaactgaaggcggcattattagatatcaattgtgttaaacatatcatttatgtggataacaagactatcaatagagcggagtaccccgaggggcttgagattcacagcatgcagtcagtagaggagctgggatccaagccagaaaactcaagcattcctccaagtagaccaactccttcggacatggccattgtcatgtacaccagtggctctactggccgccccaagggagtgatgatgcaccatagcaatctgatagctgggatgacaggccagtgtgagcgcatacctggattaggaccaaaggacacatatattggctacttacctttggctcatgtgctggaactgacagcagagatctcctgctttacctacggctgtaggattggatattcgtcaccactcacactgtctgaccagtccagcaaaatcaagaagggaagcaagggtgattgtactgtactgaaacctacacttatggcggccgttccggaaatcatggatagaatttacaagaatgttatgagcaaggttcaagagatgaattatattcagaagactctatttaaaattgggtatgattataaattagagcaaatcaagaaaggatatgatgcccctctttgtaatctgatactgtttaagaaggtgaaggctcttctaggaggaaatgtccgcatgatgctgtccggcggtgccccactgtccccccagacacaccgattcatgaatgtctgcttctgctgccccattggtcagggctatgggctgacagaatcatgcggtgctggaacagttactgaagttaccgactacactactggaagagttggcgctcctcttatttgctgtgaaattaaactgaaggactggcaggaaggtggttatacagttcatgataagccaaaccccagaggtgaaattgtgattggaggccagaatatctccatgggatattttaaaaatgaagagaaaacagcagaagattattctgtggatgaaaatggacaaaggtggttttgcactggtgatattggagaattccaccctgatggatgcttacagattatcgatcgtaagaaagatctggtgaagctgcaagccggagagtacgtgtctcttgggaaagtcgaagccgcactgaagaattgtccactgatcgacaacatctgtgcttttgccaaaagtgaccagtcttatgtgatcagttttgtggttcccaaccagaaaaagttgactcttttggcacaacagaagggggtagaaggatcttgggttgatatttgcaataatcctgccatggaagctgaaatactgaaagaaattcgagaagctgcaaatgccatgaaattggaacgatttgaaattccaatcaaagttcgattgagcccagagccatggacccctgaaactggtttggtaacagatgccttcaagctgaaaaggaaggaactgaagaaccattatcttaaagacattgagcggatgtatgggggcaaataaaaggcaactgtctacttcacatttgcacaggaggtggcctgatggtttttttagttctagagtttaagcctttgttgatctctctgttaaaatgtaaggtgaatcttctaaagacatgaaacaaaaaaacaaccaaaagtggttacaataaattgcatagtcctagagaagctgaaattgaagacatttccctttagctgtgttattaagtttagagcaaaaattctgttttagaatattagccttagctacacttgtttttctaaagatactccatgctaaagtaaacaaattggacttggactaggtgtagttgaagaaatctacagcttccagtgtctatgtcttcctagttcagaagtttctatcgtaatcattaggacaaaattacgtattaacactactcaaagccgaagttccaccaggctttgaaatcctcttccaaccatttctcttgaagggaaaaaaatcagttgtaataaatggattcagtatcttagaaggtattattttaagctcataattgccatgtaggtgagacatagaatcattataatattgtgaataattacagtgcctgaagttaaaactaaaacaacacacacataccaaaaatatctcataatgtatttgaagggaggctgaattgctcctttggatgtctaagaacttaaatcagcaactgtaattattgaaatgtcttcagaaaaatgtccactttgtaaaagtgacctttctgtgtgtgatctagtcaaaggctgagaccaaggggaacatgttagaaagtcaatcagaattcaataagatacattgcttttctgttagaaagttcatggcatcctaagcattcagaattaggatcctggcatagcactgagcctgggaaagagatttagcctctttaactttgataccagggcttgattttaaaatgtgcttgtattaaattacatttgtaatttatggtctgtttgctgttgctgattgattcttgatcagtagtgtgcatttcagagagcctttcattttgctttaatttcagcaaagcgggttatgataaatgacttcctcgaatcttgttcaaacctacgggtgattaagtgtcttggatgagtctgaggaagttaaagggaagaaaacactgttaacacttttcctgtttgtgaagagtttagaaactggaaatgctagatttgggagaagggcagagttacttgattaaggactgtctgtgcagtaacttgggagtgtgagtttctttttaaatcttcagctaaaatctggaattatatattcttgatagatattcgcacttgaaccatagttactgtatgtaaaaagcaaaaattcttaatactgttattctttgcacttttttcatagtcattttatacacacacacacacacatgcatgtgtatgtgtgtgtgtatatataatatatatatgttgcttacattgtgttgtacagatgtgggccaccactacaacaaaatgagttctttgtgctctaaaatatttataaagaaattatttaaatgttatgtatatggtggtaatattgagaaaaaaaatcatctggtattctgagcaacagcgaaggtttttgtaaaagtttcttttcagtgttgtgcaaactaaaatttgaggcaagttttccctgaagttctatgtgagtattctcatgcttcccatcttgcctttgaagtgtgaaaagacatcaagtagactactagtcagcttctacctactcctagtgcactgtttatccgtttttttttaaaggcttttccaatatatgtatcccatttggaatggtgattttaaaatgtgagtgcatgcagactatcttacttaagatacttgcaccccacccacagccatctcccaaagctggaacactgccaactaggtccttaagaatcacgcattgaatacaaggtcgggtgctgctaattcttcatgaaaatcctaacacacacgttaagggaccagggagatgccactgccctctgacttttcatcaaaaaaaaaatatatatatacatgtttatgtaaacagaactattttccatattcatagtgactttttaagtatttgagcctaaaggttttgatctccattttatacctatttaaatcgttcacaatttcatgtcagccatcaattaaagctgtgcttactgttgattgtgtgtgcatttctaaggtgaacgctcctaattttttgctttaattacatgaaagggtcttatttctttgatatttgtgctcttttttttaatgtagactgaaggtatgattgtgtgacttttaagaaatgaaataccgatgaatgatccatagagtccaaagtgagggagaatgctgtttctttgttcatagagactgactagtaatctttgcctatattttcctggtagcagatgacaaatgtttctacagtgacaagctgagaagaggttaaaggttaaagattgtgtggcattcgggaactggagagatacgttttaattttgaatgtagttacaaattttatattcatatttgtactttctgttaatgcacgattgtagaattgttctgtagattttttgtgtttactcttgaaaggctttgtttgttcttctttttaagtttgcacttgaatcttataaaataaatc

SEQ ID NO: 1155 - DNA, 2092 bp, Rattus norvegicus
  Genbank Accession No. NM_053662
agtctcgctttgggttccggctgcgtcgggcgtgcgtgtagctcgctagaactatggcgtccgggcctcacccgacatcgaccgctgccgccgcctctgcctcgtccgccgccccgagtgcgggcggctccagctccggcacgacgaccacgacgacgacgacgaccggagggatcctgattggcgaccgcctgtactcggaggtgtcgcttaccatcgaccactcggtgattccggaggagcggctctcgcctaccccgtccatgcaggacggcctcgacctgcccagcgagacggacctgcgcatcttaggctgcgagctcatccaggccgccggcattctcctccggctgccgcaggtggcgatggctacggggcaggtgttgtttcatcgttttttctactccaagtctttcgtcaaacacagtttcgagattgttgccatggcctgtattaatcttgcatcaaaaattgaagaagcaccaagaagaataagagatgtgattaatgtattccaccacctccgccagttaagaggaaaaaggactccaagccccctgatccttgatcagaactacattaacaccaaaaatcaagttatcaaggcagagaggagggtgctaaaggagttgggattttgtgttcatgtcaagcatccccataagatcattgtaatgtatttacaagtcttagaatgtgaacgtaaccaaaccctggttcagactgcctggaattatatgaatgacagtcttcgaaccaatgtttttgttcgctttcaaccagagactatagcatgtgcttgtatctaccttgcagctagagcacttcaaattccattgccaactcggccccattggtttcttctttttggtaccacagaagaggagattcaagaaatctgcatagagacacttagactttataccaggaaaaagcctaactatgaattgctggaaaaggaagtagaaaaaagaaaagtagccttacaggaagccaagttaaaggcaaagggattgaatcttgatggaactccagccctttccactttaggtggtttttctccagcctccaaaccatcatcaccaagagaagtaaaagctgaagagaaatcaccagtttccattaatgtgaagacagtcaaaaaagaacctgaggatagacaacaagcttccaaaagcccttataatggtgtaagaaaagacagcaagagaagcagaaacagcagaagtgccagtagatcaaggtcaagaaccaggtcacgctctagatcacacaccccaagaagacattataataataggcgaagtcgatctggaacatacagctcaagatcaagaagcaggtctcgcagtcacagtgaaagtcctcgaagacatcataatcatggttctcctcaccttaaggccaaacataccagagaagatttaaaaagctcaaatagacatggtcataaaaggaaaaaatctcggtctcgatctcagagcaagactcgggatcactcagatgttaccaagaaacacaggcatgaaagggggcatcacagagacaggcgtgaaagatctcgctcctttgagaggtcccataaaggcaagcaccacggtggaagtcgctcaggacatggcaggcataggcgctgactttcatcctctgacactgcatcggtccctggtgttgcccatatgcagtgtgacgatgtatggactcaatcaaaacatgaaaagcaaactgattagggattgatttattaaaattgtctaggtttctagaaacactgaggacattttcttttgaaaagaactatgttaaggttttttgcacattaaaatgccctagcagtatctaattgaaaaccatggtcaggttcaattgtactttattatagttgtgtattgtttattgctataagaactggagcgtaaattctgtaaaaatgtatcttatttttatacagataaaacttgcagacactgttctatttaagtggttatttgtttaaatgatggtgaatactttcttaacactggtttgtccgcatgtgtaaagatttttacaaggaaataaaatacaaatcttgtttttctaaaaaaaaaaa

SEQ ID NO: 1156 - DNA, 2393 bp, Rattus norvegicus
  Genbank Accession No. NM_053713
atcttcgttgacttcggggtttgggtacccctctctcttcttcggactccggaggaccttctgggcccccacattaatgaggcagccacctggcgagtctgacatggctgtcagcgacgctctgctcccgtccttctccacgttcgcgtccggcccggcgggaagggagaagacactgcgtccagcaggtgccccgactaaccgttggcgagaggaactctctcacatgaagcgacttcccccacttcccggccgcccctacgacctggcggcgacggtggccacagacctggaaagtggtggagctggtgcagcttgcagcagtaacaacccggccctaccccggagggagaccgaggagttcaacgatctcctggacctagactttatcctttccaactcgctatcccaccaggaatcggtggccgccaccgtgaccacctcggcgtcagcttcatcctcgtcttccccagctagcagcggccctgccagcgcgccctccacctgcagcttcagctatccgatccgggccgggggtgacccgggcgtggctgcgggcaacacaggtggagggctcctctacagccgagaatctgcgccacctcccacggcccccttcaacctggcggacatcaatgacgtgagcccctcgggcggcttcgtggctgagctcctgcggccggagttggacccagtatacattccgccacagcagcctcagccgccaggtggcgggctgatgggcaagtttgtgctgaaggcgtctctgagcacccctggcagcgagtacaccagcccttcggtcatcagtgttagcaaaggaagcccagacggcagccaccctgtggtagtggcgccctacagcggtggcccgccgcgtatgtgccccaagattaagcaagaggccgtcccgtcctgcacggtcagccggtccctagaggcccacttgagcgctggaccccagctcagcaacggccacaggcccaacacacacgacttccccctggggcggcagctccccaccaggactacccctacactgagtcccgaggaactgctgaacagcagggactgtcaccctggcctgcctcttcccccaggattccatccccatccggggcccagctaccctcctttcctgccagaccagatgcagtcgcaagtcccctctctccattatcaagagctcatgccaccgggatcctgcctgccagaggagcccaagccaaagaggggaagaaggtcttggccccggaaaagaacagccacccacacttgtgactatgcaggctgtggcaaaacctatacgaagagttctcatctcaaggcacacctgcgaactcacacaggcgagaaaccttaccactgtgactgggacggctgtgggtggaaattcgcccgctcagatgaactgaccaggcactaccgcaaacacaccgggcaccggccctttcagtgccagaagtgcgacagggccttttccaggtcggaccaccttgccttacacatgaagaggcacttttaaattccacatcgtggacatgacccacactgccaggagagagttcagtatttttttttaacctttcacactgtcttcccacgaggggaggagcccagctggcaagcgctacaatcatggtcaagttcccagcaagtcagcttgtgaatggataatcaggagaaaggaagagtccaagggacaaaagaaaagaaaagaaaaaaatactaaaaaacaaacaaacaaaaaaaaaaaacaaaagaaaaaaatcacagaacagatggggtctgagactggatcttctatcattccaataccaaatccgacttgaacaagactggacttacaaaatgccaaggggtgactggaagtttgtggatatcagggtatacattaaatcagtgacctggggggagggaagaccagagttcccttgaattgtgcttcaatgatgcaatatacatggaaagaccaccttgtatgctctttgccttctaaaaagccattatgacgtcagaggaagaggaagcaattcaggtacagaacgtgttctaatagcctaaacgatggtgcttggtgagtcgtggttctaaaggtaccaaacgggggagccaaagttctccaactgctgcatactttgacaaggaaaatctatttttgtcttccgatctacatttatgacctaagtcaggtaaataagcctggtttatttctgtaacattttttatgcagacagtctgttatgcactgtggtttcagatgtgcaataatttgtacaatggtttattcccaagtatgcctttaagcagaacaaatgtgtttttctatatagttccttgccttaataaatatgtaatataaatttaaaaaaaaaaaaaaaaaaaaaaaaaaa

SEQ ID NO: 1157 - DNA, 2680 bp, Rattus norvegicus
  Genbank Accession No. NM_053742
gcagctgtgagggcttcccggaagatggtgctgattaaggaattccgtgtagttttgccgtgttctgttcaagagtatcaggttggacagctttactctgttgcagaagcgagtaagaatgaaactggtggtggagaaggaatcgaagtcttgaagaatgaaccttatgaaaatgatggcgagaagggacagtacacacacaaaatctaccacctgaagagcaaagtccctgcgttcgtgaggatgattgctcccgagggctccttggtgttccatgagaaagcctggaatgcttacccctactgcagaacaattgtaacgaatgagtacatgaaagatgacttcttcatcaaaatcgaaacatggcacaaacctgacttgggaacattagaaaatgttcacggtttagatccaaacacgtggaaaaccgttgaaattgtccacatagacattgcagatcgaagtcaggttgaaccagcagactacaaagctgatgaggaccctgcgttattccagtcagtcaagaccaagagaggccccctgggacctaactggaagaaggagctggcaaacacccctgactgtcctaagatgtgtgcctataagctggtgaccatcaagttcaagtggtgggggctgcagagcaaagtagagaacttcatccagaagcaagaaaaacggatatttacaaacttacatcgccagctcttttgttggattgacaagtggattgacctgacaatggaagacattaggagaatggaggacgagactcagaaagaactagaaacaatgcgtaagaagggttccgtccgaggcacgtcggctgctgatgcctagatgagcccctgtaggtcagagacattatcaaactgtctacggagtcaaggccaagtgagggggaccagtgcggcctgcgacgactaaagccaccagcgtctcagtgttgacggatgtttccagtgtgtgcctctgacggctcgggcacacttgtgcacactcgagggcacacacacacccatgcacacacactcacactgtatgtatgtctgtagctgtatgtaaagcacatatggctacaggcctagatacacacgagtgtatatatatatgtacatgtgaagatggatcagtaccttttctccaaagtactgcacctgtcttcagcagaaatactaaagaaaatattttcaatatatatacctggaacagatattaatacccatcaacatgatgccctggatggacaaacggactgccatgtggtgccctgtggtgctggctggcgtgcttcgtgaatgccaggtgtggaccagtgtgtacagcctttggttaggtttctgtttttttcaagtcaccacacacacacacacgtttagtctcaacccatcagcaacaactcctacagaaagattttttcaaatttttagatactccagtgactctggaatgtaaactctggatgtatttataactatttatttctgggtggccactatcttccagccaaatccaacaatatctgtcaagtaaggagtgaaagctctttattggtttgcccgagggttggggatatccttttttttaaaaaattgccactttttattggatttttgtattttgaatttcaagtatttttctatatcaaatctagcaaaaaacggtgatgacggtttgtgatttataataaacactgacaatattcagattctggctaagcaaacagggtgatcaggcaattaacctgagtggcactggaggctgtgcagagccattctgtggagttttgtttctgaaatggcttttctggaattacggcctggagactggatggtctgtattgctctcagttcacagggtaggagagtggtcccgcccggctgtttccagttacagtccaagctaggaggaaatgctgatgggagcaggcacagcttgagcatgacacaggcctgtccccgtcctgaggcccagctagacctgggccttgccgacagctctgcttcctcctcctgtatctcctcctcctcccccttcctcttctgtctctactttctcctttttttttaagagaaaggagcagtagctgggaaggattttcttttttttacctttccgtctgatgctattctcctctcgtcagtcctggaaccctgaccagcatcacactgttgaatccttcaggttacacactgccttttaacctccaccctgcagtcagagcacggtggtgacacccctttgttgacaggcttgaccttcatgtcccttctgccctgccctgtgtcccatgggggaaatggcagagagtcccactgcatcacactgccctgttagcctcagcaacaagccctgggttccatgtcctctaagctctagataaaggtggttattccctgggcactgctggaagctgggaaggtcaccaccagaagggtcattgccagccttgtctcctccagtgaaaccagatcacagacatccatagtttctctgagagctggggcacacaaggaaaccagagcccagtatggattcttgtgttgctctagcagctgtggagattgagggatgtggtgaatgcaaagaacccagtttacttggcagtctcctgtgtaaatcacagtaaaacaaagtgaaatcgaaacaagaataaatttgatctcaaaatgaaaaaaaa

SEQ ID NO: 1158 - DNA, 871 bp, Rattus norvegicus
  Genbank Accession No. NM_053788
atgaaggaccgaacccaggagctccgcacggccaaggacagcgatgacgacgatgatgtcactgtcactgtggaccgagaccgcttcatggatgagttctttgaacaggtggaagagatccggggctttattgacaagattgctgagaacgtggaggaggtgaagaggaaacacagcgccatcctggcctccccgaaccccgatgagaagaccaaggaggaactggaggagctcatgtcggacattaagaagacagcgaacaaagttcgctccaagctaaagagcatcgagcagagcatcgagcaggaggaaggtctgaaccgctcgtcggcggacctgaggatccggaagacgcagcattccacgctgtcccgaaagtttgtggaggtcatgtccgagtacaacgccactcagtcagactaccgagaacgctgcaaagggcgcatccagaggcagctggagatcactggccggaccacgaccagtgaggagttggaagacatgctggagagtgggaatcccgccatctttgcctctgggatcatcatggactccagcatctcgaagcaggccctcagtgagatcgagaccaggcacagtgagatcatcaagttggagaacagactccgggagctacacgatatgttcatggacatggccatgctggtggagagccagggggagatgattgacaggatcgagtacaatgtggaacacgctgtggactacgtggagagggccgtgtctgacaccaagaaggccgtcaagtaccagagcaaggcacgcaggaagaagatcatgatcatcatttgctgtgtgattctgggcatcatcatcgcctgcaccatcgggggcatctttggatagatcc

SEQ ID NO: 1159 - DNA, 774 bp, Rattus norvegicus
  Genbank Accession No. NM_053810
atgtctggctatcctaaaagctataatcctttcgacgatgatgtggaagacgaggacacccggccggcgccgtggaaggacgcccgcgacctgcccgacggccccgacgcgcctattgacaggcagcagtacctgagacaagaggtgttacgcagggccgaggctactgctgccagcaccagcaggtccttgtccctcatgtatgaatcggagaagatcggagtcgcctcttcagaggagctggtccggcagcgaggagtcctagaacacacggagaagatggtggacaagatggatcaggacttgaagatgagccagaaacatatcaacagcatcaagagtgtgtttggaggattcatcaactacttcaaatccaaaccagtagagcctccacctgagcagaatggcagcatcgtcccccagcccagcagcagattgaaagaagccataaatacaagtaaagatcaggaaagcaagtaccaagccagccacccaaacctcagaaggctacatgatgcagaactagactctgttcctgcttctactgtgaatactgaggtttacccaaagaactcaagccttagagcttatcaccagaagattgacagcaacctagatgagctgtctgtgggattgggccgcctaaaggacatagccttaggaatgcagacggaaatcgaggagcaggatgacatccttgaccggctaacaaccaaagtggacaagttagatgtcaatataaaaagcacagaaaaaaaggtgcggcaactctag

SEQ ID NO: 1160 - DNA, 740 bp, Rattus norvegicus
  Genbank Accession No. NM_053819
cggactcctagagacacgctagagcagataccacgatggcgccctttgcatctctggcctctggcatcctcttgttgctatcattgatagcttccagtaaagcctgtagctgtgccccaacccacccacagacagctttctgcaactcggacctggttataagggctaaattcatgggttccccagaaatcatcgagaccaccttataccagcgttatgagatcaagatgactaagatgctcaaaggattcgacgctgtgggaaatgccacaggtttccggttcgcctacaccccagccatggagagcctctgtggatatgtccacaagtcccagaaccgcagcgaggagtttctcatcgcgggccgtttaaggaacggaaatttgcacatcactgcctgcagcttcctggttccctggcataatctgagccctgctcagcaaaaggccttcgtaaagacctatagtgctggctgtggggtgtgcacagtgtttccctgttcagccatcccttgcaaactggagagtgacagtcattgcttgtggacagatcagatcctcatgggctctgagaagggctaccagagcgatcactttgcctgcctgccacggaatccagatttgtgcacctggcaataccttggggtctcgatgacccgaagccttcccctggcaaaagctgaagcctgaacactgtttacctttcctccatctttctttctcttaaatggtgaaataaag

SEQ ID NO: 1161 - DNA, 982 bp, Rattus norvegicus
  Genbank Accession No. NM_053835
gggagctgacagcagccacgcggggaagatggctgaggacttcggcttcttctcgtcgtcggagagcggggcccccgaggccgccgaggaggacccggcggccgccttcctggcccagcaggagagcgagattgctggcatcgagaatgactcgggtttcggggcacctgccgccagccaggtggcctctgcgcagcccggactcgcgagcgggggtggttcggaggacatggggactacagtcaatggagatgtgtttcaggaggctaacgggcctgccgatggctacgctgcgattgcccaggcggacaggttgactcaggagcctgagagcatccgcaagtggagagaggagcagaagaaaaggctgcaggagttggatgctgcctcgaaggtgaccgaacaggagtggcgggagaaggccaaaaaagacctggaggagtggaaccagcgccaaagtgaacaggttgagaagaacaagatcaacaacaggatcgctgacaaagcgttctaccagcagccagatgctgataccattggctatgtggcatcggaagaggcttttgtgaaagaatccaaggaggagaccccaggcacagagtgggagaaggtggcccagctgtgtgacttcaaccctaagagcagcaagcaatgtaaagacgtgtcccgcctgcgctcggtgctcatgtccctgaagcagacgccactgtcccgctagtgcctgtcaccacgggccttggtggggcagagcagcagctgcttcagccagggtggaacttctctggcagctgccacacacgcctgttctgttcctctgagtctctgggagctgggaagcgggacccttacccctttcacccaccctgtccttcctggtcccctgttccagcccctcatgactcctgtcagtccacttgattgtgactgtccctcctgatgtatttttcttggcttaaagggtgtgttaactctttttacactt

SEQ ID NO: 1162 - DNA, 2141 bp, Rattus norvegicus
  Genbank Accession No. NM_053840
cgcctccttgctgctgccaccagtgttgaccatcctcccagcctagctggacctcttgcagaggactccttatcccacatcccactcagaagctttcagctgcccttctaggatgctgggcacactttagctgacctattgccctctgggataggagtaccagcctgctctaacggtttcagggaagattggctgtgggtttccgcagagtgtgggggagttcctgcttatccatacagctgattttcaagaaccacctccccaagaaaggtttgggggctcctactggacgagccatgaagaatcggtttctggtgctgggcctggtggcggtggttctggtgttcgtcatcatcggcctctgcatctggctacccaccacctctgggaagcctgaccatgtgtactccaaggcggccgtggccacagatgccaagcgttgctcagagattgggcgggatatgctacaggaaggcggctccgtagtggacgcggccatcgcagcctgctgtgtatggggactcattaatgcccacgtatgggcatcgggggcggcctcttcttcaccatctacaacagcaccacacgaaaagctgaagttatcaatgcccgtgaaatggctcccaagttggccaataccagcatgttcaataattctaaggactctgaagaaggaggcctttcagtggcagttccttggtgaaatccgtggctatgagctggcacaccaacggcatggccggctaccctgggctcgcctcttccaacccagcatccaactggctcgccatggcttccctgtgggcaagggcttggcaagagccttggacaaaaaacgggacatcattgagaagacacctgctttgtgcgaggtgttctgccggcaagggaaggtgcttcaggaaggagagacagtaactatgccgaagttggccgatacgttgcaaatactggcccaggaaggggccagggccttctacaatgggagcctcacagcccagattgtgaaagacatccaggaggctgggggcattatgacggttgaggaccttaacaactatcgtgcggaagtgatcgagcatccgatgagcatcggcctcggggactccaccctgtacgtgcccagcgccccactcagcgggcccgtgctgattctcatcttgaacatcctcaaaggatacaacttctctccaaagagcgtggcaaccccagaacagaaggcgctgacgtatcaccgtatcgtggaggcctttcggtttgcctatgccaagaggaccatgctcggtgacccaaagtttgtcgatgtgtctcaggtcatccgcaacatgagttctgagttctacgctactcagcttcgagcccgcatcactgatgaaaccactcacccaaccgcctactatgaggctgaattctaccttccagacgatgggggtaccgctcacctgtccgtggtttccgaggatggcagtgctgtggccgccaccagtaccatcaacctctactttggctccaaggtcctctctcgggtcagtggcatcctgtttaatgacgagatggatgacttcagctcgcccaacttcaccaaccagtttggggtagcgccctcaccagccaacttcatcaagctaggtaagcaaccgctttcatccatgtgcccctcaatcatcgtggataaggacggcaaggttcggatggtggttggagcctcgggaggtacccagatcaccacgtctgttgcactggccatcatcaacagcctgtggttcgggtatgatgtgaagagagctgtggaggagccccgtcttcacaaccagcttttgcccaataccacaacagtagagaaaaatattgatcaggtggtgactgcaggtctgaagactcggcaccaccatacagaggtcacacccgacttcatcgctgtggttcaggccgtcgttcgaacgtcaggtggttgggcagctgcctcagattccagaaaaggcggggagcccgctggctactgagtgcccggaaggggcaagactgacctgcagccaagagacgagagtgggactctggagaacatgctgcccctgggtgggagagagcaggataataaacagaggccgccgccaagttgcgggaagcctttgcaggctgga

SEQ ID NO: 1163 - DNA, 1420 bp, Rattus norvegicus
  Genbank Accession No. NM_053845
gtgggacttcagatcctgcaactgcctctggccatggcgggacctgagtggcagtccctggagcagtgcctggaaaagcatctgccgcctgacgatttgagccaggtgaagcgaattctctacggcaagcaaactaggaatcttgatctgcccagaaaagctttagaagctgcctcagaaagaaacttcgaactgaagggatacgccttcggggcagccaaggaacagcagagatgtccccagatcgtgcgcgtggggctcgttcagaacagaatcccgctccccacttccgcccctgtggcagaacaggtctctgccctccacaaacgcatagaggaaatagctgaggtggcagcaatgtgcggagtcaacatcatctgtttccaggaagcctggaatatgcccttcgctttttgtacacgagagaaacttccttggacagaatttgctgagtcagcagaggacgggctcaccaccaggttctgtcagaagctggcaaagaagcacaacatggtggtgatatctccaatcttggagcgtgacagagatcacgggggagttctatggaacacagctgtggtgatctccaactcgggactggtcatgggaaagaccagaaagaatcacatccccagagtgggcgacttcaatgagtccacttactacatggagggaaacctcggccaccccgtgttccagacccagtttggcaggattgccgtgaacatctgctatgggcggcaccaccccctcaactggctcatgtacagcgtcaacggagctgaaatcatcttcaacccttcagccaccattggagaactcagtgagtccatgtggccgatcgaagccagaaacgcagccatcgctaatcactgcttcacctgtgccctcaaccgtgtgggtcaggaacactaccccaatgagtttacttctggagatggaaagaaagctcaccatgacctcggctacttctacggttcgagctacgtggcagctcctgacggtagccggacccccggcctctcacgcaatcaggacgggctgctggtcactgagctcaacctcaacctatgccagcagattaatgatttctggactttcaagatgacgggccgacttgagatgtatgcccgggagcttgccgaagctgtcaaacccaactacagtcccaacattgtgaaggaagacctggttctagcccctagctcgggttaggttcgggggcagtggttaagttctaaacatgtgtgcgagagagttttcaatacccaggcaggaggagggtagactgggcaagcgtgtgtgtgataactgttgataagggatatgagatttttcttctggggatttggaaatgttttggggttcaaaaggtgatccgacagcattgaaacttcaataaacataactggatcgtaaa

SEQ ID NO: 1164 - DNA, 843 bp, Rattus norvegicus
  Genbank Accession No. NM_053857
gggccgaggtgccgcggggttgctggagggtcgtgggcggcgtgcaggagacatgtcggcgggcagcagttgcagccagactcccagccgggctatccccactcgccgcgtagccctcggcgacggcgtgcagctcccgcccggggactacagcaccacccccggcggcacgctcttcagcaccaccccgggaggaaccagaatcatctatgaccggaaattcctgatggagtgtcggaactcgcctgtggccaaaacacccccaaaggacctgccaaccattccaggggtcactagccctaccagcgatgagcctcccatgcaggccagccagagccatctgcacagcagcccggaagataagcgggcaggtggtgaagagtcacagtttgagatggacatttaagggaccagccataggacgcagtgatgcttctgggcccctggggcccttgggaggagagccacagcagtcaggccttgtacccggcagacactgggtgtggatcggccacccagtcctgctcctcactcagggcacctgctctgccttccattttgtgaataccagcacatacctccttgtgcctctgttgatactgagctgctactccagggtaatgactctcacctacaccctccctgcatcaagcgccagcgagtggacacagaggagtctgtcggaatgatctggcaattctagccccaacctctggagcacacccaccttaccttaggttggggtacctgggaaagccaccctttacttctttccctgagaggaaataaaagccacatttaccctaggcccacagccgggccctgtctgaaaaaaaaaaaaaa

SEQ ID NO: 1165 - DNA, 5180 bp, Rattus norvegicus
  Genbank Accession No. NM_053887
gaattccgcacccggggcgggacaagaggtctgctttccaaagagaaggcttcgcgtctgtctgcagcaggcgacagtcccgggcgccacctgcgcttcgggcgcgggccaggctggtgcgcgccgggcccccagcgcccgctactgagagcgtgaagtgaccgaccgtgagtcctccggcttgcgtccccttccagcaccagggactcacgccccaattactgcttgctcaagggtggacgagctccggccgagccgctgccccgccccgtactacctggcagctgcccgggtgcagcgcacagcgccccgcgcggccccagcagagcccctgccctcccacctgcgccgcgcgcccgccgctccgtgctcccgagacaggagacgcggccccgctcccgctcgcgcccgcgcactcggcgcagcgcgcgcgcccgccgctccgcccgccccccgcgctctccccgccccctccctcccccgcaggcacgagcgaatgtagcccgcgagagaaaatggcggcggcggcgggcgatcgcgcctcgtcgtcgggattcccgggcgccgcggcggcgagccccgaggcgggcggcggcggcggagctctccagggaagcggcgcgcccgcagcgggcgcggggctgctgcgggagactggcagcgcgggccgcgagcgcgcggactggcggcggcagcagctgcgcaaagtaaggagtgtggagctggaccagctgccggagcagccgctcttcctcaccgcctcgccgccctgcccatctacttccccgtcgccggagcccgcggacgcggctgcaggagcgagtggcttccagcctgcggcgggaccgccacccccgggagcagcgagtcgctgcggctcccactctgccgagctggcggccgcgcgggacagcggcgcccggagccccgcgggggccgagccgccctctgcagcggccccctccggtcgagagatggagaataaagaaaccctcaaaggattgcacaagatggatgaccgcccagaggagcgaatgatcagggagaagctcaaggcgacctgtatgcctgcctggaagcacgagtggttagaaaggaggaacaggagaggccctgtggtggtgaaaccaatccctattaaaggagatggatctgaaatgagtaacttggcagctgagctccaaggagagggccaggcaggctctgctgcaccagctcccaagggccgacgaagcccgtctcctggaagctccccatcagggcgctcagggaagccggaatccccaggagtgagacggaaacgagtgtccccagtgcctttccagagtggcagaatcacaccacctcgaagagccccgtcgccagatggcttctcaccgtacagcccagaggagacgagccgccgtgtgaacaaagtgatgagggccaggctgtacctcctgcagcagataggacccaactctttcctgattggaggagacagtccagacaataaataccgcgtgtttattgggccacagaactgcagctgtgggcgtgggacattctgcattcacctcttgtttgtcatgctccgggtgttccagctagaaccctccgaccccatgctatggagaaaaactttaaaaaattttgaggttgagagtttgttccagaaataccacagtaggcgtagctcaagaatcaaagctccatctcggaacaccatccagaagtttgtctcacgcatgtcaaactgtcacacattgtcatcgtctagcacatccacatctagttcagaaaacagcatcaaggatgaagaggagcagatgtgtcccatctgcttgttgggcatgctggatgaggagagcctgactgtgtgtgaagacggctgcaggaacaagctgcaccaccactgcatgtcaatctgggcagaagaatgtagaagaaatagagaaccgttaatatgtcccctttgtagatctaagtggagatcccatgacttctacagccatgagttatcaagccctgtggattcccctacctccctgcgaggtgtacagcagccctcctccccgcaacagcctgtggccggatcacagcggaggaatcaggaaagcaattttaaccttactcattatggaacccagcagattcctcccgcttacaaagatttagccgagccatggattcaggcattcggaatggagctcgttggctgcttattctctagaaactggaacgtaagggagatggcccttaggcgcctttcccacgatgttagcggggccctgttgttggcgaacggggagagcactggaacttctggaggcggcagcggaggcagcctaagtgctggcgccgccagtgggtcttcccagcccagcatctcaggggacgtggtggaggcgttctgcagcgtcctgtctatcgtgtgcgctgaccctgtctacaaagtgtacgttgctgctttaaaaacactgagagccatgctggtatacactccttgccacagcctggcagaaagaatcaaacttcagagacttctccggccagtggtagacaccatcctagtgaagtgcgcagacgccaatagccgcacgagtcagctgtccatatcaacactgttggagctctgcaagggccaagcgggggagttggcagttggacgagaaatacttaaagctggatccatcggtgttggtggcgttgattacgtcttaagttgtattcttggaaaccaagctgaatcaaacaactggcaagaactcctgggtcgcctctgtcttatagacagattgctcttggaaatttctgcggaattttatcctcatattgtcagtaccgatgtctcacaagccgagcctgttgaaatcaggtataagaagctgctgtccctcttagcctttgccttgcaatccattgacaattcccactctatggtcggcaaactctcgcggaggatttatctgagctcagcacgaatggtgaccacagtgccccccctgttttccaagctggtaaccatgctaagtgcttctggatcctcccacttcgccaggatgcgccggcgtctgatggccattgcagacgaggtagaaattgccgaggtcatccagctgggttcggaagacactttggatggccagcaggacagctcgcaggcattggcccctccccgctatccagagagcagctcccttgagcacacagcccatgtagagaaaactggaaaaggattaaaagctacgagactgagtgccagctcagaggacatttctgacagactggctggcgtttctgtaggacttcctagttcagcaacaacagaacaaccaaagccaacagttcaaacaaaaggcagaccccacagtcagtgtttgaactcctctcctttgtctcctcctcagttaatgtttccagcaatatcagccccatgttcatctgccccgtctgtcccagctggctctgtaacagatgcttctaagcatagacctcgggcgtttgttccctgtaaaataccctctgcgtctccccaaacacagcgcaagttttccctacagttccagaggacctgctctgagaaccgagactcagaaaaactctccccagtctttactcagtcgagacccccaccctccagtaacatacacagggcaaaggcatcccgacccgttccgggtagcacaagcaaactaggggatgcctcaaaaaacagcatgacactcgacctgaacagtgcttcccagtgtgatgacagctttggcagtggcagcaacagtggcagcgccgtcatacccagtgaggagacggcattcaccccagcagaggacaagtgcaggttagatgtcaaccccgagctcaactccagtatcgaggaccttcttgaagcatctatgccttcaagtgacacaacagtcactttcaagtccgaagtcgccgtcctctctcctgagaaggccgaaagtgatgacacctacaaagatgacgtcaatcacaatcaaaagtgcaaagagaagatggaggctgaggaagaggaggcgctcgcgattgccatggcaatgtcggcttctcaggacgccctccccatagtccctcagctgcaggtggaaaatggagaggatatcatcatcatccagcaggatacaccagaaaccctaccagggcataccaaagcgaacgagccctacagagaagacaccgagtggctgaaagggcagcagataggcctcggagcattttcttcttgttaccaagcacaggatgtgggcactggaactttaatggctgtgaaacaggtgacctacgtcagaaacacatcttctgagcaggaggaagtggtggaagccttgagggaagagatcaggatgatgagccacctcaaccatccgaacatcatcaggatgctgggggccacgtgcgagaagagcaactacaacctcttcatcgagtggatggcgggagcctccgtggctcacctcttgagtaaatatggagctttcaaggagtcagtggtcattaactacacagagcagttactccgtggcctttcctatctccacgagaaccagatcattcacagagacgtcaaaggggccaatctgctcattgacagcaccggtcagcggctgagaattgcagacttcggtgctgccgccaggttggcatccaaaggaactggtgcaggagagttccagggacagttactggggacaattgcattcatggcgcctgaggtactaagaggtcagcagtacggtaggagctgtgacgtctggagtgttggctgcgccattatagaaatggcctgtgcaaaaccaccctggaacgcagaaaagcactccaatcatcttgctttgatatttaagattgcgagtgcaactactgcaccatccatcccgtcacacctgtccccgggcctgcgagacgtggctctgcgctgtttagaacttcaacctcaggacagacctccgtcaagagagctactgaagcatcctgtcttccgtacaacatggtagtcaactgctcagggtgcgcaacaaggaaagaaaactcgcgggcagccacgttgatagtctgctggcctcataccactgaccagaagaggggccagtggggagcccgcacctaagcatgtgactgacaaatcatgactgcacctgagctccgtctgcagacggctacaactcgtgcaggagctg

SEQ ID NO: 1166 - DNA, 1765 bp, Rattus norvegicus
  Genbank Accession No. NM_053902
ttgaaaaggtactggaaactgaggaccctatctggatcaaagcagtttctgatggagccctcgcctcttgagctaccagttgatgcagtgcggcgcatcgcggctgaactcaattgtgacccaaccgatgagagggtggctctccgcttggatgaggaagataaactgaagcgttttaaggactgtttttatatccccaaaatgcgggacctgccttcaattgatctatctttagtgaatgaggatgataatgccatctatttcctgggaaattcccttggtcttcaaccgaagatggttaaaacatacctggaggaagagctagataagtgggccaaaataggagcctatggccatgaggtagggaaacgtccttggattataggagatgagagcattgtaacccttatgaaggacattgtaggagcccatgagaaagaaatagctctaatgaatgctttgactgttaatttacatctcctgctgttatcattctttaagcctacaccaaagcggcacaaaattcttctagaagccaaagccttcccttctgatcattatgcgatcgagtcacagattcaacttcatggacttgatgttgagaaaagtatgcggatgataaagccacgagagggggaagagaccttaagaatggaggacatactggaagtaattgagaaggaaggagactcaattgctgtggtcctgttcagtggcctgcacttttatactggacagctgttcaacattcctgccattacacaagccggacatgcaaagggctgttttgttggctttgacctagcgcatgcggttggaaatgttgaactccacttacatgactgggatgttgactttgcctgctggtgctcctacaagtatttaaattcaggagctggaggtctggctggtgccttcatccatgagaaacacgctcacacgatcaagccagcgttagtgggatggttcggccatgaactcagtacaagatttaacatggataacaaactacaattaatccccggggtcaatggattccgaatttccaaccctcccattctgttggtctgctccttgcatgccagtttagagatctttcagcaagcaactatgactgcgctgaggagaaaatccattctgctgacaggttatctggaatacttgctcaaacattaccatggcggaaatgacacagaaaacaagaggccagttgtgaacataatcaccccatccagagcagaggaacgaggctgccagctgacactgaccttttccatttccaagaaaggcgtttttaaggaactagaaaaaagaggagtcgtctgtgacaagcgagaaccagaaggcatccgggtggccccggttcctctctataattctttccatgatgtttataagttcatcagactgcttactgccatactcgactctacagaaagaaactagccatgctttctaaataactcaagtaaatctcacacactgggggttccacttctactgcattttagtcattcaaaagtctccagaaattgatggcatagaaatgatgatgattttataaacttacataaaacctggtacatgttttaatatctgtgtcgctgatgtgctgtggactaagaagtcacattttacatgactccaacctacagatgactgtcttgatcagctgtcaccttccatggtcactgaaaggttgtgtgtttaatttgtgactgaaatgacaacattaaaatgtatctggacttcttgtataaaaaaa

SEQ ID NO: 1167 - DNA, 4543 bp, Rattus norvegicus
  Genbank Accession No. NM_053927
gccgagcaggacgccagcgccagcccggtccccacgccgcggcgcgcccggccttcgcgtctcccccagaacaatcaaccatgacaaccgaatcaggatcagactcagaatccaagccagaccaggaggctgagccccaggaggcagcaggacctcaggagcaagcaggggcacaggctgcacctgagcctgctggcggaaacgtcgaggagcagccaggactagagcagttccctgaagctgctgcacacagcacgccggtgaagagggaggtcagcgacaaagaccgggacttcgccgccgcagctgcgaaacagcttgagtatcagcagtttgaggacgataagctctctcagaagtcatccagcagcaaactctcacggtccccattgaagatcgtgaaaaggcctaaaagcatgcagtgcaaagtgacgcttctggatggatctgagtacggctgtgatgtagataagcgctcccgaggacaagtgctgtttgacaaagtgtgcgaacatctgaacttgctagaaaaagactacttcggtctcacgtatcgagacgcagagaatcagaagaactggttggaccctgctaaggaaattaaaaagcagattcgaagtggtgcttggcatttttcatttaatgtgaagttttacccaccagaccctgcccagctatcagaagatatcaccaggtactacctctgcttgcagctgcgagatgatattgtgtctggacgcctaccctgttccttcgtgaccctcgccctgctgggctcctacacagtgcagtcagagcttggggactatgatcctgatgaatgtggaaatgactacattagcgagttccgctttgcgccaaaccacacgaaagaactggaggataaagtgatcgagctgcacaagagccacagaggaatgacgccagccgaggcagagatgcacttcctggagaatgccaaaaagctctccatgtatggggtagacttacaccacgcaaaggattcggaaggcgtggagatcatgttaggggtctgtgccagcggcctgttgatctatcgtgaccggcttcgaataaacagatttgcttggcccaaggtcctaaaaatttcttataaacggaacaacttttacattaaaatccggccaggagagtttgaacaattcgaaagcaccattggcttcaagttgccgaaccatagggctgccaagcgcctctggaaagtatgtgtggaacatcatacatttttcagactactgctaccagaagcacctccaaagaaattcctgaccttgggctccaagttccgctacagtggcagaacccaggcgcagacgagaagagccagtgcattgatagaccgcccggcgccttacttcgaacgctcgtccagcaaacgatacaccatgtctcgcagcttggatggagcctcagtgaatgaaaaccatgaaatatacatgaaggattctatgtctgctgcagaggttggtacaggccagtacgccacaaccaaggtcatctctcagaccaacctgatcaccactgtgaccccggagaaaaaggctgaggaggagcacgtggaggaagaggacagaaggaagaaggccgaggaagccacgcccgtcgcagccctccggcacgagggaaagtcaccagggcatggctctgactcatgtcccctgtcacctccatcagcccatcttgaccctccctctcccacagagctccgtaggaggtgcaaggagaaagaaagggcctctccaggttctgctgtgcctagagcagagctgtcctcggagtctgatgcccaggggaaggcctacctaggggaccaagatgtggcatttagttacaggcagccggctggcaaaggaaccacactgttttccttctccttgcagctcccagagtcattcccctcgctcctagatgaagacgggtacctctctttccccaacctgtctgaaaccaacctcctgccccagagttggcagcatttcttgcccatccgctcgccctccctccttccctgcttcctcttcatcttcttcttcctgctgtctgcctccttctcagtaccatacgccctcactctctccttccctctggctctgtgcctctgcttcctggagcccaaggcggcctccttgagcgcctccctagacaatgacccgagtgacagttcagaggaagagactgacagtgagcggacagacactgcggctgatggagagaccagtgccacagagtcggaccaggaggaagacgcagagctcaaggcacaggagctagataaaactcaagatgagctggtgaaacaccaaaccaatattagcgaactgaaaagaaccttcttagaaacctctacagaaactgccttaacaaacgaatgggaaaagaggctctccacatcccccgtgcggctggctgccaggcaggaggatgcgcccatgattgagccacttgtacctgaggagactaaacaatcttctggggagaagctcatggatggctcggagatcctcagtctattagagtctgcgaggaaacccacagagttcataggaggggtttcatctactacccagagctgggtgcagaaactggaaacgaagactgagaccattgaaacagaggtggaacccaccccacaccctcagcccctcagcacggagaaggtgttgcaggaaacggtgctggtagaggagaggcacgtgatgaacgtgcacgccagtggggacgcttctcacacagccagggatgatgtggatgccacagaatcagcacccgcagaccgtcacagtgggaatgggaaggagggctcttctgtgacagaagcagctaaggaacagagaggagaggaggctgacaagtctgccccggagcaggaacaaccagccactgtctcccaggaggaggatcaggtgtcggccatccactcttctgagggtttggaacaaaagtctcattttgagtcgtccactgtgaaggtagaaagcataagtgtgggcagtgtctctccaggaggagtgaagctagagacctctaccaaggaggtgccagtggtccacacagagacgaaaaccatcacgtacgagtcttctcaggtcgatcctggggcagatctggagccaggtgtgctaatgagcgcccaaacgatcacgtctgaaaccacgagtactaccaccaccacacatatcaccaaaactgtgaaaggaggcatttcggagacgaggattgagaagcgaatagtcatcacgggagatgccgacattgaccatgaccaggcgctggctcaggcaattaaagaggccaaagagcagcaccccgacatgtcagtaaccaaagtagtggtccataaagagacagaaatcacaccagaagatggagaggattgaccgcaggaataactcagctagcacgtgaacccagtcgtgtaagccgtcaggaaaaccggagcctatgtgggattccctcttctaacccaactgactcataaccgtccgtggaaaattccgatccaggaaagctgactttgaccgttagatgaaagaccctggcagagagatcttcccataataaagcaatccaaaatcagcatcattaaactgatactgcatgaagcaacgataaaaaaaaatcacaaaggagcagcacttttaattttcaccaaaatatctccgttttcaactctacctgcacgttcataaccaacagtgtaagccgtgatctcatgtaacccatcgacaactcatgcctttcctagtttattattaaaagtctcaacaaagttgcagtttcatagatgacaaattctctgtttacaataaatggtaatcaccctacaatgctgtcagccgtctaggtccttctggtgtgtcagatttaccccagattagatgtgccaataaccaaccttatccagtaaacaacttgaatcgtgtccttgtctaatctggttttgttattctcgcccataagcagttacaactctctgaccctctagaaatgtttaatgcttacaaaccttgctttatgtctctaatttgctgtaaggtagcattggttttagcacactgatgtggtttcttcttccacacttgctctggtctctattcgacccagaaagattcccagaattacctaagcaaaccctcaataatgtaaattatcatttgtgtgggaagaaaatacatattttttgttagtttataatattatgaaaattcactccagggaatacctgtctggctacctttactttctgttcttttttctttttcattgattttttttttcttcttttacttgaacaaaaaggtgttttatttacaaatctggtccatacttacaatctagttcagaaccaagccttaaattgtacagaatttccactgtaattaaaatatttagtgttcagttataaatagcctccagaaagatatattgtccactacactgtcaactgcatcacagcccgtcgtgaatgatgtcaccgcatcgcgaaataaaaatggcaaatgcattgaaaaaaaaaaaaaaa

SEQ ID NO: 1168 - DNA, 1227 bp, Rattus norvegicus
  Genbank Accession No. NM_053955
ggcacgagcgggttcgaaggcaggcggcgagatgaggcgggcgccagcgtttctgagcgccgacgaggtgcaggaccacctccgcagctccagcctcctcatcccgcccctggaggccgcactggccaacttctccaaaggtcccgacggaggggtcatgcaaccggtgcgcaccgtggtgcctgtggccaagcaccgaggcttcttgggagtcatgccagcctacagtgccgctgaggatgcactcaccaccaagttagtcaccttctatgagggccacagcaacaatgctgtcccctcccaccaggcatcagtgcttctctttgatcccagcaatggttccctgctggcggtcatggatggaaatgtcataactgcaaagaggacagcagccgtctctgccatcgccaccaagtttttgaagcccccaggcagtgatgtgctgtgcattcttggggctggggtccaggcgtacagtcactatgagatcttcacagaacagttctccttcaaggaggtgagaatgtggaaccgcaccagggaaaatgctgagaagtttgcaagctcagtgcaaggagatgttcgggtctgttcatcagtgcaggaggctgtgacaggtgccgatgtcatcatcacagtcaccatggcaacggagcccattttgtttggtgaatgggtgaagcccggagctcacatcaatgctgttggagccagtagacctgactggcgagaactggatgacgagctcatgaagcaagcagtgttgtatgtggactcccgggaggctgccctaaaggagtcaggagatgttctgttgtcaggggctgacatctttgctgagcttggagaagtggtttcaggagcgaagcctgcatactgtgagaagaccacggtgttcaagtctttggggatggcagtggaggacctggtcgcagccaaattagtgtacgattcgtggtcatctggcaagtgagcagaaggagctgtgcctgagctggatggacgtcacggctcaaacgctggctcagtgtctagatcaaaggaggcctagtccccagtgaacgggagtgagagtcactcataagtattgacatccctattcatgtttgtggttggatagctaaacccttctgttagggggtgatggccacattacctacccttgatcttactagccttgtgtgtctctgaaataaatcatttccagttcaaaaaaaaaaaaaaaaa

SEQ ID NO: 1169 - DNA, 4529 bp, Rattus norvegicus
  Genbank Accession No. NM_053961
aagcttcttgatttcacttttcttcagtcacaaacttgaggatggagctttaagagtatacacatggcctactattcggctatcacccaggcccagcttaggctctttttaaaaaaaagtcatttttttttaagatttatttattttatgtctatgagtacactgtagctgtcttcagacacaccagaagagggcatcagatctcattacagatggttgtgagccaccatgtggttgctgggaattgaactcaggacctctggaagagtagttgggtgctcttaaccgctgagccatctctccagccccccctttttttaaaaatatatttattgtatatatgtgagcacactgttaccatattcagacacaccagaagagggcatctgatcccttacagatggtcgtgagccaccatgtggatgctggggattgaactcaggacctctggaagagcaaccagtgttcttaaccactgaaccatctctccagtccatctgtatggctttcttttttttggttctttttttttttttcggagctggggaccaaacccagggccttgcgcttcctaggcaagcgctctaccactgagctaaatccccaaccccctgtatggctttcttaattgccagattttaacttcttctctcacctcctctaactactgcaatagatactcaactgcgctcagcctcagtcttctcccttctgatgcattctcttcattcattatccttttttatagtgagaaaaggttgctctataaagtccaggctgacctgagactaaattggccgtgctggcttcccattcacagagacccaccggcctcagctgagtgctggggtcaaaggctctagccatcatgcccagctgcaatgtcttttcttaaagggacatcaggcccgctggattggggcctgcctgtaggaggtcacttagctttaattatttctctaattactacaattatctctctaaatgcaattgtagtgcatctgaggcacgtgatttaatctgtgttatcccaaagtcctcttcaggtttcctcaggtctccagtgctctccttcccaggaaggcttggaactaaagccacatcatggtttttttgttttttttttctttttttcggagctgagctggggaccgaacccagggccttgcacttcctaggcaagcgctctaccactgagctaaatccccaaccccccacatcatgtttacgtgatgttttcatccacgaatctgagaaaacgctccacttaaagcctctggtggctgtaaaccccttgagactagtgagtctttatcttaccctcctgagtttgcctttacatagcttcatagagctcagcatgcttaaccatatcctgtttcccgttgcttcacaaatgttccctacctttcaaagtcatggctccccaactacctgggtacctcgatgacacgagtaagcaggactgactcgtaatacaggatcttcaaaggtggaaagccatgagatgggagtgaagattttaacacttaactgggtagatgggagccctggagaccacactcacaactcaaaaaggtaaggaggacatacaggtcttttttgggacatagccatgtgacactgtgacagaatgaccagtgtgtcatacttgcacagcctgtgtagaggtcaaggtcagtatggctggtcaaatggagggcagctagctgcctattagaggggcggtcattaggcgacaactgtaaaaagcacagctgaaggactgatcgctcctagggatggtggaggaggaattttattgtagataaaagggagagagcatagtcagagcaaagacggctgggagagtcagaggggcagcctgggttaagacactgacgaagagagtgccatagctaaaatggctggattatataaggaaaggcagctggacgaagggcagtccagaccttgggttggggaagtttagggtggggagcagggcatgcctgccataccctgaaggattctgggaaaacctcatggccaggtccactttgatgttagtcacctcagtttgtcccagggtttcagacttaacagtaataagaaagatagaaagtgcccgacataatccagctttggtttcatgattctacaggtgtgtgtgtgtgtgtgtgtgtgtgtgtgtgtgtgtgtgtgtgtgtgggtgtgtgtgtgcgtgcatatagaggtcactgattaagctcaatttggtgatcttcctcgcttccccagtactggcaagaattccacacccagctttttatgttttgtttttgtcattttgagacccaggttgactctgaagggcctagacctcactctgtagaccaggttggccttgaactcaggttcaccagccttggacttaggagtggtaagatgtgcttttcccttgggtgctgaggatgggacttatatgtgatgtgtacgagtcctggaacagggtatgtggatcagattttgatcagcctgccagttttccagtgagcactgggattgaaggcctgtgctgcctcacacagcctgctagctatgatccctgtgtcttctccagtgaggaattcattccttcgagcctttatcactgtgctgacttcccacgggaacaatcatcacgtggcatgagctactccctgaaaacggaacagcccagcctggtcttgtcaccctcctgccttgtgctgaaattaggcctgtaggcctgtgccacctactatacctgaccaaaagtagaatggcgaataggccttttcccaaccttctggggcaggggtggccccattgcctaagtgccccgcgggcctgtccagcgctgcaccctgtgacctacaagggcttggcagcgactaccagtgacaaacagctgactaaccgggggaagcgacgggtctcaacggacctcatgacagcccagcgcagagaaggcagggacgccgccacgtcttgttccaaggcgagagagggcaacgagggaattgttgaggctgcgcctcgcgcctctcctcacgcgagaacgccgcgaaacccagcctagacgagtggcacggagtgcgcgtgcgcgacagtcccacttcgcaggcccttccgtcacgtggccccagcccacctccccccacctcccccccaccgtgcccccgcttctctcactacacatgcgcagccgcccctctctgccccgcccctctgcggccggtctcttccaccctagaggccgcctgagcctctccgagtggccacgtgcgctcatgcgcgccggcgggacggccctcccagtgacgtgaccgcccactcggagcgctcctgctgtagcttgcccatctcccgctcccacaatccggcgtgatggctgccgccgttcctggcgccgtttcgctctccccactgctgtccgttctccttggcctgctgctcctctctgctcctcatggcgccagcggcctgcacacgaagggcgcccttcccttggacacagtcactttctacaaggtcattcccaaaagcaagttcgtcttggtgaagttcgacacccagtacccctatggagagaagcaagatgagtttaagcgtctggctgagaactcagcctccagcgatgatctcttggtggcagaggtggggatctcagactatggtgacaagctgaacatggagctgagtgagaagtacaagctggacaaagagagctacccagtcttctacctcttccgggatggggactttgagaatcctgtcccatacagcggggcagttaaagttggagccatccagcgctggctcaaggggcagggagtctatctgggcatgcctggatgtctgcctgcgtacgatgccctggcgggccagttcatcgaggcctccagcagagaggcccgccaggccatcctgaaacaggggcaggatggcctctcaggtgtgaaggagacagacaagaagtgggccagtcagtacctgaagatcatggggaagatcttggaccaaggtgaagacttcccggcctccgagctggcccggatcagtaagctcattgagaacaagatgagtgagggtaagaaggaagagctgcagaggagcctcaacatcctcaccgccttccgcaagaaaggcgccgagaaggaggagctgtgagggcaccaggctgctagggtttgctgagggcggggagggagagccgcctgctgactgtggggccctgtgggtggagggggcagtggagcaaagcagtcctgagccagagacctgtgccccgagtgcctggacactgaggctgctgagaccataccctggacatccttggagcagtttgtggggagcctgtgtgccaagacaagatggctgtgtcccacaggagctggtactatagaggaaggtccttgacaggtatagttctgatcaaataaaagtctgttttggttagatgattttcttctcagatagtactttttggcccctgtcaagagtctgagctgttgtgcattctattctgccaagacttgcctgcgtaa

SEQ ID NO: 1170 - DNA, 963 bp, Rattus norvegicus
  Genbank Accession No. NM_053971
ctctttcccgtcttgcaagatggcgggtgaaaaggcggagaagcctgataaaaaggagcagaaacctgcagccaagaaggctggcggtgatgctactgcgccccgcgccggggcctggtgcgtcaaaaagagtagttctaaggctaaaaagctgaggaagagtaagccccattgcagccggaaccctgtcctggtgagaggaatcggcaggtattcccgatctgctatgtattccagaaaggccttgtacaaaaggaaatactctgctgccaagacaaaggttgagaagaagaagaagaaagaaaaggtccttgctaccgtcacaaaaacagttggtggggacaagaacggtggcacccgggtggtgaagcttcgaaaaatgcctaggtattaccctactgaagacgtgcctcggaagctgctgagccacggcaagaagcccttcagccagcacgtgaggcggctgcgctccagcatcactcccgggactgtcctgatcatcctcactgggcgccacaggggcaagagagtggttttcctcaagcagctgggcagtggcttgctacttgtgactggacctcttgccctcaacagagttcctctgcgtaggacacaccagaagtttgtcatcgccacctctacgaaagttgatatcagcaaggttaaaattcccaaacacctgactgatgcttacttcaagaagaagccacttcgcaagcccaggcatcaggagggtgagatcttcgacacagagaaggagaaatacgaaattacagagcagcgaaaggctgatcagaaagctgtggactcgcagattttgccaaagatcaaagctgtcccccagctccagggctacctgcggtctcagttctccctgacgaacggcatgtaccctcacaaactggtgttctaattgttaacaacctaattaaactgcttcataaggaaaaaaaaaaaaaaaaa

SEQ ID NO: 1171 - DNA, 1647 bp, Rattus norvegicus
  Genbank Accession No. NM_053974
cctctcgcccccccttcaggagcggttgtgcgatcagatcgatctaagatggcgactgtggaaccggaaaccacccctaccactaatcccccacctgcggaagaggaaaaaacagagtctaatcaggaggttgctaatccagagcactatattaaacaccctctacagaacaggtgggcactctggttttttaaaaatgataaaagcaaaacttggcaagcaaaccttcggttgatctctaagtttgatactgttgaagacttttgggctctatacaaccatatccagttgtctagtaatttaatgcctggctgtgactactcactttttaaggatggtattgagcctatgtgggaagatgagaaaaacaaacggggaggacgatggctaattacattgaacaagcagcagagacgaagtgacctcgatcgcttttggctagagacactgctgtgccttattggagaatcttttgatgactacagtgatgacgtgtgtggagctgttgtcaatgttagagctaaaggtgataagatagcaatatggacgactgaatgtgaaaacagagatgcagtcacacacatagggagggtatacaaggaaaggttaggacttcctccgaagatagtgattggttatcagtcccacgcagacacagctacaaagagcggctccaccactaaaaataggtttgttgtttaagaagacaccttctgagtatcctcacaggagactgcgtcacgcaatcgagattgggagctgaaccaaagcctcatcaaagcagagtggactgcactgaagctgactccatccaagtgttgctaagatataagagaagtctcattcgcctttgtcttgtacttctgtgttcattctcctccccaccccaatttttgctagtgtgtccacatcccaatcaaagaattacagtatacgtcaccccagaacccacagatgtgttcctggcccgctctgtaacagccgggtagagttaccacgacacacacttgcctttccacagtattcgaaaaagaacgtgcatttctgtcaccttagcaggaaaagatctggttttgttccactccatgcaggagcggatttgctggtgtgagagtctaagtacagctttctagcaaccttctgttttctgtcacagcattgtccttgctgtcctcttgctgatggctgctagatgttaatttatttgcttccctccttgataacattagtgattctgatttcaggtttttcatttgtttggcttttgtttttttcctcatgtaacattggtgaaggatccaggactatgacagaaaggtggaataaacattacatttgtgcattctttggtaagtttttttgttttttgtaactacaaagctttgctacaaatttatgcatttcattcaaatcagtgatctatgctgtgtgatccctaaacataattgtggactataaaaatgtaacaccataattacattcctaactagaattagttgtctgcttttgtatctttatgctgtactttaacactttgtattacttaggttattttgctttggttacaatggctcaagtagaaaagcggtcccatccatattaagacagtgtacaaaactgtaaataaaatgtgtacagtgaattgtc

SEQ ID NO: 1172 - DNA, 1107 bp, Rattus norvegicus
  Genbank Accession No. NM_053985
agcggtttggtcgttcgttggaggagcttcgtcttgttctgctctgcgattgcggcgcttgttcgagcgcttacagcggcgcgtcggtcccagcaagggcctcagacttcagctttgggtgagagaagatggcccgaaccaagcagaccgctaggaagtccaccggagggaaagccccccgcaaacagctggccaccaaggcggcccggaaaagcgcgccctctactggcggggtgaagaaacctcatcgctacaggcccgggaccgtggctctaagagagatccgtcgttaccagaaatcgactgagctgctcatccggaagctacccttccagaggttggtgagggagatcgcccaggatttcaaaaccgacttgaggtttcaaagtgcagccatcggtgcccttcaggaggctagcgaggcatacctggtggggttgtttgaagataccaatctgtgtgccatccacgccaagagagtcaccatcatgcccaaagacatccagttggctcgccggatacggggggagagagcttaagttgaagcgatttttatggcattttgtagtaaattctgtaaaatactttggtttaatttgtgactttttttgtaagaaattgtttataatatgttgcatttgtacttaagtcattccatctttcactcaggatgaatggaaagagtgactgttcacagacctcagtgatgtgagcactgtggctcaggagtgacaagttgctaatatgcagaagggatgggtgatacttcttgcttctcatgatgcatgtttctgtatgttaatgacttgttgggtagctattaaggtactagaattgataaatgtgtacagggtccttttgcaataaaactggttatgacttgatccaagtgtttaaccatacatcactgtgatagaatgtgggctttttcaaaggttgaagatacaagttttagccacagtgtaacagtttcctttaaaaaaaaaaaagtaaacctggcagctatagaatacactatgtgcatttataatagctattttatatattgtagtgttcaacatttttaaattaaatgttttacattcacaaaaaaaaaaaaaaaaaaaa

SEQ ID NO: 1173 - DNA, 760 bp, Rattus norvegicus
  Genbank Accession No. NM_057099
gcggccgccttagctgttcgtggagccgtctctgcaccggcctttgggccggaggcgctcactccagactgggaaaaccgagaagtctccacagggaccacgatcatggctgtgcaatttgacgggggcgtggttctaggagcagactccagaacaaccactgggtcgtacatcgccaatcgagtgactgacaagctgacccctatccacgatcacatcttctgctgccgctcaggctcggcagctgatacccaagcagtagctgatgctgtcacgtaccagcttggtttccacagtattgagctgaacgagcctccactagtgcacacagccgccagtctctttaaggagatgtgttaccgctacagagaagatctgatggcaggaatcatcatcgcaggctgggaccctcaagaaggagggcaggtgtactctgttcccatgggaggtatgatggtaagacagtcctttgccatcggaggctccgggagctcatatatctatggctatgttgatgctacctatcgggaaggcatgaccaaggatgaatgtctgcaattcactgccaatgctcttgctttggctatggaacgggatggctccagtggaggagtgatccgcttggcagccattcaacagtcgggggtagagcggcaggtgcttttgggagaccagatccccaaggtcaccatctccactttgccacctccctgaagcctaggattcccatcccgacgcacaagctaataaacagattgtc

SEQ ID NO: 1174 - DNA, 2573 bp, Rattus norvegicus
  Genbank Accession No. NM_057100
ccgggctcccggcccgggcctcgccatgccgccaccgcccgggcccaccgccgccctgggcactgcgcttctgctgctcctgctggcctccgagtcttcgcacactgtgctgttgcgggcgcgtgaggcggcgcagttcctgcggcccaggcagcgccgcgcctaccaagtcttcgaggaggccaagcagggccacctggaacgggagtgcgtggaggaggtgtgcagcaaggaggaggctagagaggtgttcgagaacgaccccgagacggactatttctatccaagatatcaagagtgcatgaggaaatatggccggcccgaagataaaaacccaaatttcgccacctgtgttaagaacttacctgaccaatgcaccccaaacccctgtgataagaagggcactcaactctgccaagacctcatgggcaacttcttctgcttgtgcaaagatggctggggaggccggctctgtgacaaagatgtcaacgagtgtagtcagaagaatgggggctgcagccaggtctgccataacaaaccaggaagcttccaatgtgcctgccacagtggcttctcacttcaatcagacaacaagagctgccaagatatagatgaatgcacagactcagacacctgtggggatgcgcgttgcaagaaccttccgggctcctactcctgcctctgcgacaaggggtacacttacagctccaaggagaagacctgccaagatgtggatgagtgccagcaggaccgttgtgagcagacctgtgtcaactccccaggcagctatacctgccactgtaatgggcgcgggggcctaaaactgtccccagacatggatacctgtgaggacatcttaccgtgtgtgcccttcagcatggccaagagcgtcaagtccttgtacctgggccgcatgttcagcgggacccccgtgattagactacgcttcaagaggctccagcctaccaggctgctggccgaatttgacttccgtacttttgaccctgagggagtcctcttcttcgccggaggtcgctcggatagcacctggatcgtcctgggcctcagggctgggcgacttgagttgcagctacggtacaatggcgttggacgcatcaccagcagtgggccaaccatcaaccacggcatgtggcaaacgatctctgtggaagaactggaccgcaaccttgtcatcaaggtcaacaaagatgccgtgatgaagattgcggtggctggggggctgttccagctagagagaggcctgtaccacctgaatctcactgtggggggcattcccttcaaggagagtgacctcgtccagccgattaaccctcgcctggacgggtgcatgaggagctggaactggctgaatggggaagacagtgccattcaggaaacggtcaaggccaatacaaaaatgcagtgcttctctgtgacagagaggggctccttcttcccggggaatggatttgccttctatagcctcaactacacccggacatcgctggatgtcggcacggaaaccacctgggaagtagaagtcgtggctcgcattcgccctgccactgacacgggggtgctgatggcactggtgggggacaaagacgtcgtcctcctctctgtggccctggtcgactaccactccacaaagaagctcaagaagcagctggtggtcctggcagttgagaatgttgccctggccctgatggaaatcaaggtgtgcgacagccaggaacacactgtcactgtctccctgcgggatggcgaggccaccctggaagtggatggtaccaagggccagagcgaagtgagcaccgcacagctgcaggagcgactggacctgcttaagacacgtctgcaaggctccgtgctcacctttgtggggggcctgccagatgtacaagtgacttccacacccgtcacggcgttctaccgtggatgcatgactctggaggtaaacgggaagaccctggacctggatacggcctcctacaagcacagtgacatcacctcccactcctgcccgcctgtggagcacgtcacagcctagaccgagctgcaagagttctctacacctaaaagacacggtgaagcagggtcagggacacacagcaccatctcctctcgcatgggccctgcaacactggagcaggtgcagggctacgatgggtactacgtactgtccgtggagcagtaccccgagctggctgacagtgccaacaacatccagttcctgagacaaagcgagatcggcaagaggtaacccccgggccacccctgcgcagattctcctgtagcacaaaccgaaccggactctccaaagagccttccagaatgacactgctctgcagacaccctcggcgcagacacaggcaacacaaaccagaaacaaagacgactttttttttctctaaatgaccttaaaggtgatcggctttaaagaatatgtttacatacgcatatcgctgcactcaattggactggaagtatgagaaggaaaaaaaagcattaaaaaggcaacgttttgccatgaccctctgtaccttcgaggcactgtatttaacaaaagtttt

SEQ ID NO: 1175 - DNA, 1593 bp, Rattus norvegicus
  Genbank Accession No. NM_057105
atggcttgccttcttcctgctgctcgacttcctgcaggctttctcttcttagtgctctggggctcagttctaggtgacaagctgctggtggtcccccaggatggcagccactggcttagcatgaaggagatagtggagcacctcagtgaacgcggacacgacattgtggtgctagtgccagaagtcaatttgcttttgggagaatccaaatactacaggaggaaaagcttcccggtcccctacaacctagaagagttgcggacccgctatcgctcctttgggaacaaccactttgctgccagttcccccctgatggctcctctaagagagtacaggaacaacatgattgtcattgacatgtgctttttcagctgccagagcctcctgaaggactcggccaccctcagcttcctcagggagaaccagtttgatgctctgttcacagacccggccatgccctgtggtgtgatcctggctgagtatctcaagctgccttccatctacctcttcagaggtttcccatgctctctggagcacatgcttggtcaaagcccaagccccgtatcctatgttcccagattctacaccaaattctcagaccacatgacatttccccaacggctggccaacttcattgctaacatcttggagaactacctttatcattgtctgtactcaaagtatgagatccttgcctcagacctcctcaagagagatgtgtccctacctgccttacaccagaactctctgtggctgttacggtatgattttgtgttcgaatacccccggccagtcatgcccaacatgatcttcattggagggaccaactgcaagaagaaggggaacctgtctcaggaatttgaagcctatgtcaacgcctccggagaacatggcatcgtggttttctctttgggatccatggtctcagagattccagagaagaaagcgatggaaatcgctgaggctttgggcagaattcctcagacggtcctgtggcgctacaccggaactagaccatcgaaccttgcaaagaacactattcttgtcaaatggctaccccaaaacgatctgcttggtcatccaaaggctcgggcgttcatcacacactccggttcccatggtatttatgaaggaatatgcaatggggttccaatggtgatgatgcccttgtttggtgatcagatggacaacgccaagcgcatggaaactcggggagctggggtgaccctgaatgtcctggaaatgactgccgatgatttggaaaacgcccttaaaactgtcatcaataacaagagttacaaggagaacatcatgcgcctctccagccttcacaaggaccgtcctatcgagcctctggacctggctgtgttctgggtggagtacgtgatgaggcacaagggggcgccacacctgcgccccgccgcccacgacctcacctggtaccagtaccactccttggacgtgattggctttctcctggccatcgtgttgacggtggtcttcattgtctataaaagttgtgcctatggctgccggaaatgctttgggggaaagggtcgagtgaagaaatcacacaaatccaagacccactga

SEQ ID NO: 1176 - DNA, 1978 bp, Rattus norvegicus
  Genbank Accession No. NM_057119
gtggtgcggagcgagtcgactttggactactctcttagcgtggcgtcgcgcgaggctgcggcggagcctctgtcaggaaggcgggagcttgacagcttcagtaaagaccagcagcggtgacagcaacccggagtcatgagcgacagcggcgagcagaactacggcgagcgggaatcccgttctgcttcccgaagtggaagtgctcatggatcggggaaatctgcacggcacacacctgcaaggtctcgctccaaggaagattcaagacgttctagatcaaagtcaagatccagatctgaatctaggtctagatccagaagaagttctagaaggcattatacaaggtcacgatcacgatctcgctctcatagacgatcccggagcaggtcttacagccgagactatcgcagacgccacagccacagccattctcccatgtctactcgaaggcgtcatgttgggaaccgggcaaatcctgaccccaactgttgtcttggagtgtttggattgagcttgtacaccacagaaagagatctaagagaagtgttctctaagtatggccccattgctgatgtgtctattgtgtatgaccagcagtctagacggtcaagaggatttgcctttgtatattttgaaaatgtagatgatgccaaggaagctaaagaacgtgccaatggaatggagcttgatggacgtcggattagggtcgatttctctataacaaaaaggccccataccccaacaccaggaatttatatggggagacccacttatggcagttcacgacgccgggactattatgaccgaggatatgatcggggttatgatgaccgggactattacagcagatcatacagaggaggaggtggaggaggaggtggatggagagcagctcaagatagagatcagatttacagaaggcggtcaccttctccttactacagtcgtggaggatacaggtctcgttctcgatcaagatcctactcacctcgtcgctattaaagcatgaagttgaagactttctgagacctgccatagagctgggatgttgtttgtggacaatattttctattgtctcctgtttaaaaagtgaacagtgcctagtgaagttaggtgacttttacaccttttatgatgactacttttggtggagttgaaatgctgttttcattctgcatttgtgtagttcggtgctttgttcaaagttaagtgttttcagaaaagtatgttttgcatgtatttttttacagtccaaattttgactgctgagaagtttctattgtacaaaacttcatttaaaaggtttttctactgaatccagggtattctgaagatcgaagcctgtgtgtaaaatgctaccagatggcaaaaagcaacaataaacaagtttgatttttacttttctttctaaatatcaatgcttaacaagaaccattcttaagttatcagtaaaaaataaataaataaaaattttctttcaggagtccatgaaacttgccatattcgatatacctgcaattaagtgttaaaaatacgctgtaactctgtactgctagtattagaacaagaatctttccatacagctaatgcttaatgcttacattaatgtggatttgtcggcctttatgtaatctgtattatatatagcaggggataagagctacagatagatacatgcctttaaaaggctgtttcttaaggctgttacaaggagataatggtatttcaactaatcagcaagtgacaatacattccaccacaaatgtactcttgttcttctagcctttagactatgaaaatactgggtgcttcaaagtatggaatgagagaagggatcaccacacctgtgtcatggatgaagactgcctgttcattttttaaatatgattttcaggtcctttgcttaccaaaggaagcccaattcactcaaatgttttgagaactgtttaaataaacaagcaagaaaaattgctgatgc

SEQ ID NO: 1177 - DNA, 5253 bp, Rattus norvegicus
  Genbank Accession No. NM_057130
gtccagggaggctcctccgcacgccatgtgcccgtgtccccggcatcgcggccgcgggcccccggccgtgtgcggttgcggcgacgctcgccccgggctgcgctgggcggcggcgcaggtgaccgcgctgcggctgcaggcgctgggcgacgagctgcaccgacgcgccatgaggcgtcgcgcgcggccccgggacccgctgcccgcgctgctgcccgcgctccgcgcccgctggccctggctgtgcgcggccgcgcaggtggcggcgctggcggcctggctgctcggcaggcggagcgcgtaggcggcgcgcgcggggccttcttggtgggggggaccggagccgagacccagcccggaccgagcaacaggttggcgaaaccctgtgtccttggaggaagctggttcctgttttcctgagggagtagcccggagtgcggaaggaagccaagagtgtacagagttgatggtgggaacgcgggcagaggaagcccctcgggaagtccagctgcagagatagccacctcagtgctatttacatagagctatatatatacaaaacaggagaaaaatacaaaattccgtatctgtgcatgcctgcgggggacgtggtccctttcctttccacgcaaccttgcgatgtgaactctgagactttgtgatgtctagggtggcaggggagagagatgcttgctgctgcgcgtgcagggaacttacgtggacctgtgggatcggcctcagtgtggaccaactgctcagcacagatgctggtgtggagtagagggaactcagcggccgaaggcaagatggacaagacagaggggacgtggggcccgttttgttgggggcagcctgggatccctccatttcttgacatgtcctagcctctcactgtccccgttgagtcagctctctagatctcatggcggtcatagccagagaaacgggatgtcattttctttccctacctacaagtgtgtctggtgcttctcttcacagtttcttggtgctaagtgtatccttcttggtacagacagagtcttacagacagaccgggaaggccaggggatgagacgtttctattttgctctttggatagactctcgttgcttttttaaaaaagggccaggtgacaagattgccactggaaagtctctctctggggggaggggtggtgctcacagggcttaagagcagcccctcccccagggggcagggctacgaaggggaggggcgggccttatacaggagctgctttggaggtggcagtccctcctctccctgcagcagcactctgggagactgctgtggactcctccaatttcctaaggggattcagggcttaggtttttgtagattcaagagccaagaaatagctgcgttctgacggagcgtgatttctaagcaggggatgtggggggaggggggcggaccgtttaaatgaaatgtccgatttcccctgctccccaaacacacggaataagctactgttttcagaagtttctagaagggctaatataaatataaatatatatacacaaatataacgaagctgagcgctagactgacatttggctgcagtggctcacggcttcaggactggtggctttttttttttttttttaaaggaacaggtattactcctctgcatggatactgtatcacacccccccccccccaggtctttgtagccgagatggtgagggatgcttgcttgggctcagtgagacagttactcttgtttttattttatctttttttttcctttctaattttggagacaaggcctcaccctggagcccaggctgacctcagctcatgagcctccctgccctgtatctggcatttgggactctgactaccaggggagcgtcattttctcctggctggatttgcaggtgacttgcctagtacctgggggatcagggtttctgctagaaagcatcggttgttcaggtgcgcagggcttcaagggaaccggtccctggccaacattgctgagtgtgatcagtaaaatgcaccctttcccagtttgtagtcaacaggctcctctctccattttaaatccatgccttatatttctctgaataacccacttaaaaaaaaaaaaacaaaaaaacaaaaaaacacaaccgggaactcaatgctgaagcctcccccttttatctgccagaaccgaagtcagcaaagaaaactaaataaaaggagagagcctgtctggcaggggaagcagcaggcagcaggccatgccctcgcccagccagaattacacagaatgatctggaagacaccctctgcttgtgttgagtccctttcccagcaaggaaacaagtccttgcaagcatcacatttcaacatggtgggactctgtggtgtcagcctctttaaagacacacggtccagatcacagcggggggcgcgctgaccctggagagacccagcgcaaagggtgaggggtgagagaaaacctctctttctgtgttttgctttctgagcctggctttgcctgttagctagtgatagctccctggaggatttgaactccaaacacaggggttagcctctctggtcattttcatttcaatgaagctgtgttgccgagagagccgggcaccctgtgaccttcctaatggaacttctcagccaagtcctctgtaaatactctcccgtagtaatggaaaccacgtatttgtcgaatctgggccttggctcgcacgctgttcatttgagtgtgcttctcctgccccgggtttgatggggttgttttttaaatgcctgttttttctatgagatctgacttcttgatggacatttgtattagaatattgaagcatgctggctgtgtcactgttgtctcactgtctctgccgtggtgttacttggactgcatgagataatgggacagcctttctgttattggtgttattgaaaaaaaaaaaaacaaaaaaaacccaacccaacttccacagtgtgtgaagctctggcacaatctccctctctttatcctgctctccctggctgccaaggagcattgattttgattcgcttctatgtagagtctgtgaagagggagagaggctttgaaataaattttaaaaagacctcatactgggtttcagcagacagcagtgggtatgtgtgtgtgtgttcgtgcatgtgagtgtgtgtgcatccatccgactgggaggcctctgagatcattgctaaggagctggttgtgtgaggagctgaggcgccacccgggtctaaaagctgctggctgctctctgagggggagtcctgggagtctgtgggactgaagccttctagagtaggtccactcccttctggaagcttctctccctcacttcatcccccacaagcaagagctctgcccacatttggggttcaatttccctttgtctagatggagtttgagccagagttcttttggagagcccaggaaggactgtgcccactgtccacagtcctgggctgggaggccatgcccccccattccctgtccctctccacaccccatttacagttaccctggagactgcctccccacttctgtgatagccttgttctgtttcctttctaccttgatgggggatactgactgaagcctagtgtcacaggataacgaggccttgaatggcctgatgatactctttagatctgagctcatgtcctgtatgccacctgactgtactgtcatgtttctaaaattgacaaagtgtcattcttgctcactgagaactgggggagggggcagatccacgcatgagctccccaggtatctctgggagaccctgggtcactattggggacgacggcttgtttttgttattactattattgttttctgagacacggagccaggctggccttgaactctctatacagcagaggatagccctgaactcctcatcctcctgcctccacctcctgattactggaatgggccgattactggcttttgttgtggactttttggatgtccaccgtggactgttagaacacaagtctctcccgggttcatgctgttttcttttctgagcctgaagtcaacttggggagagcagggggtcagaaggtgctggggattcggggagaggggccgcagcctatttccacaggagctggtccgaagccccaccaagagggaaagcgtacatcacagtgtctcttgaaagctttagccaaaagtttatctttttgacattttaatgtattcactcgatgcttatttactgaacatctaccgtgtaccagctgaagacctccacgtctgagcaaagtgacttagttatggtacagcaacagtcctttttggagaccagatgccgtgaaatgtccctttccagtctggctcataatttagaacagatctgccgggtcaccattgtgaccccaagccttgctggcagattgctatatagtattttctgcatgccactctctgggctgaatgcaattaaaaattttgctacgttgtctccttctccactgagaggattggtcccttttgtacaataatcaacaccccccacacacacacacacaggagcacggccactgaacactgcaggaggcgcttcccaaggcttcccctgagagagccccatcctattggttagtaccactgatcccattttacaggcgaggaagctgagggcacccaaatggcaaactaagggttgcatttgagttcgtgccccccccccacaagccaatgtggtgcctgctctggtgtcacccatttgaaaagcaagcattatgggtgaaggcaagatattctaggtcaaaggcagacattgctagtctaagggcagggacaaacctgtggcccagcagggagtgtctactttagctgaaaagaaagcaagccttatttggggacacttgagagcagaaggttgtctccagttttagaaacctccagggtaaggggtatctaatgtgcaaacggactgtcccaaccattctggaggccctggggagtctcccacccctctctcctctatctcctctcccaaccctggatccccaaggtctttgcactggaagagtcaaggagccggtatggatggcagaggtggctgtgagggcatttggagactgggggagaggcagtaacttggggggacattctgtctgggtcctgacccttgttgccttgtgctcttttgtaaggggtggggggctccctgcctggatgctttgtacatatttgttacacttttattaaaaaattgatcgtgcacctct

SEQ ID NO: 1178 - DNA, 1111 bp, Rattus norvegicus
  Genbank Accession No. NM_057133
agagccaggaagaaacaggaacaagacacagaccatgagctccagccaatcaggggtctgcccatgccagggctctgcaagccaccccaccattctctacacacttctaagccccggtcccaggaccaggcccatggcacccgcatctcgcagccactgcctgtgccagcaacaccggcctgtgcgcctgtgtgctccacaccgcacctgcagggaggccttggatgtcctaggcaagactgtagccttcctcaggaacctgccgtccttctgcctcctgccccatgaggatcagcgacggctgctagagggctgctggggccctctcttcctgcttgggttggcccaggatactgtgacctttgaggtggccgaggctccggtccccagcatacttaaaaagatcttgctagaggaacccaacagtggtgcccagggtgcccagccaccagacccaccacaaccctcactggctgccgtgcagtggctgcagcactgcctggagtctttctggagccttgagctgggtcccaaggagtacgcatacctgaaaggcactatcctcttcaacccagatgtgccaggcctccatgcctcctgccacattgcacacctgcaacaggaggctcactgggcattgtgtgaagtcctggagccctggtacccagctagccaaggccgcctggcccgaatcctcctcatggcttccaccctcaagaacatctcctgtacccttctggtagatctcttcttccgccctgtcatcggagatgttgacatcactgaactgcttgaagacatgcttttgttgaggtgacctgtagaatggggtccggtgcctccaaaggggagcctgaaaggccgcactcagctcccctggagcagccctcgtctcagccccacccccagcttggatttcctcggtttgcatacagtgtttgactaactgtccagcaggcccttgatggctcccaaaacctccaggccaatatgccttcccttacctgggtagggatgggagcatgaggctgtgcttcagggcagaattcctccagactttatatagaactaagttaagttattggtttttgtaataaaaggtgtgaactgc

SEQ ID NO: 1179 - DNA, 3563 bp, Rattus norvegicus
  Genbank Accession No. NM_057139
tctagatccaacaatggaaaatctacatctacaatctcacttggaagagagtcaagaagccccttccttttgcgcacagaagaacaaattacaacaatcacacgatcagaacagaatccatcagtagatgctgccccagtgggacgacagaggaaagaaaagagactgacagacaccaggaaggaacaaggcagagctaggcccaaccaacagggagagcatgaaccctgggaaacagacattcggagtgaggatctcccaagaatcctgtctccgtgccttcattaaatcagggttcaccataggaatgctgtggccagctaggaacaaaagcatatcggcagagatgggaggaagtgggaggaagtgggaggctagagggacgtaaataaaaaaccaacagaaagaacaaaaacatacatttagggagaaactggaaggggaccgacggggacagtggcgaggtaggtgatggacggaggcacggtgtcctggtgtgggaggaattggcgccgttcgacaccaggcgggtccgttctgcagcagcactcagctatctccagcagcagccgccgcccgggccgaccagcagccgccgccacaggccgagggagccagcagtcagcggtgaacccgggccctcaccatgagttcttcgcctgttaatgtcaagaagctgaaggtgtcggagctgaaggaggagctcaagaagcggcgcctctcagacaagggcctcaaggccgatctcatggatcgactccaggccgcgctggacaacgaggcaggaggccgccccgccatggagcccgggaacggcagcctcgacctgggtggcgatgcggccgggcgctcgggagcaggcctagagcaggaggccgcggccggcgccgaagacgatgaggaggaggagggcatttccgctctggacggcgaccagatggagctgggcgaggagaacggggcggcgggggcggctgacgcgggcgcgatggaggaggaggaggcggcgtcggaagacgagaacggcgacgaccagggcttccaggagggggaggacgagctcggcgacgaagaggagggcgcgggcgacgagaacggccacggggagcagcagtcccaaccgccggcggcggcgcagcaggcttctcagcagcgcgggcctggcaaggaggccgcggggaaaagcagcggccccacctcgctcttcgcggtgacggtggcgccgccaggggcgaggcagggccaacagcaggcgggaggagacggcaaaacagaacagaaagctggagataaaaagagaggtgttaaaagaccccgggaagatcatggccgaggatattttgagtacattgaagaaaacaagtacagcagagccaagtctcctcagccacctgttgaagaagaagacgaacacttcgatgacacagtggtttgtcttgatacttataattgtgatctgcattttaaaatatcaagagaccgtctcagtgcttcttcccttactatggagagtttcgcttttctttgggctggaggaagagcttcttatggtgtgtcaaaaggcaaagtctgctttgagatgaaggtaacagagaagattccagtaagacatttatatacaaaagatattgatatacatgaagttcggattggctggtcactaaccacaagtggaatgttgcttggtgaagaagaattttcttatgggtattctctgaaaggaataaaaacctgcaactgtgagacagaagattatggagagaagtttgatgaaaatgatgtgattacgtgctttgctaactttgagactgatgaagttgaactctcttacgcaaagaatggacaagatcttggtgttgcctttaagattagtaaggaagttcttgctgaccggccattattcccccatgttctctgccataactgtgcagttgagtttaattttggtcaaaaggaaaagccatactttccaatacctgaagactgtacttttatccaaaatgtcccattagaggaccgagtcagaggaccaaaaggacctgaagagaagaaggattgtgaagttgtgatgatgattggcttgccaggagctggaaaaactacctgggttactaaacatgcagctgaaaaccctgggaaatataacattcttggaacaaacactattatggacaaaatgatggtggcaggctttaagaagcaaatggcagatactggaaaactgaacacactgttgcagagagccccacagtgtcttggcaagtttattgagattgctgcccgaaagaagcgaaattttattctggatcagacaaatgtgtctgctgctgcccagaggagaaaaatgtgcctgtttgcaggcttccaacgaaaagccgtggtcgtttgcccaaaagacgaagactataagcagaggacacagaagaaagcggaagtagaggggaaagacctaccagagcatgctgtcctcaagatgaaaggaaacttcacccttccagaggttgcagagtgttttgatgaaataacctatgttgaacttcagaaggaggaagcccagaagcttttggagcaatataaagaagaaagcaaaaaggcactgcccccagaaaaaaagcaaaacactggctcaaagaaaagcaataaaaataagagtggcaagaaccagttcaacagaggtggtggccatagaggacgtggaggattcaatatgcgtggtggcaatttcagagggggagctcctgggaatcgtggtggatataataggagaggcaacatgccccagagaggtggtggcggcggaagtggtggaattggctatccatacccgcgtggccctgtctttcctggccgaggtggttactcaaacagaggaaattacaacagaggtggaatgcccaacagagggaactataaccagaacttcagaggacgaggaaataatcgtggctacaaaaatcaatctcagggctacaaccagtggcagcagggtcaattctggggtcagaagccatggagtcagcattatcaccaaggatattattgaatacccaaataaaacgaactgatacatatttctccaaaaccttcacaagaagtcgactgttttctttagtaggctaactttttaaacattccacaagaggaagtgcctgcgggttccttttttagaagctttgtgggttgatttttttttcttttcttttttgtacatttttaattgcagttttaaagtgaatcgtaagagaacctcagcattgtgcacgataagagaatgtgtcagtatttcagggttctacattttatctgtaaaatgtgactttttttttatcacaacaaaagtaaaatgttgctttgtacctggtgtcttttattaagcatttactctcccatttctcacagagaataacagtcgggagtcattgtcacaatgaaatagcaatgtcagcaaccagattcatggaaggactgagggtcctcatgaatggcattaagattctgtactgctcataatacactccatcctctctagatggccgggcaatagtggaggggtaatctctgac

SEQ ID NO: 1180 - DNA, 2828 bp, Rattus norvegicus
  Genbank Accession No. NM_057155
ttcccttgatctactcatcgccagcatctggagacccaatggcccaagcctactggcaatgctacccctggcttgttctcctctgtgcatgtgcatggagttacccagggcctgagtcccttggaagagaagatgtgagagactgttcaaccaatcctccgcgcctgccagttactgctgtcaatacaacaatgcggcttgcagccctccgccagcagatggagaagtcgaatctctctgcctacatcatcccagacacggatgcacacatgagtgagtatattggcaaacatgatgagaggcgagcatggatttctggcttcacagggtctgcaggtactgctgtggtgaccaagaaaaaagcagctgtctggaccgatagtcgttactggactcaggccgagaggcagatggactgcaattgggaactccataaggaagttagcatttcgtcaattgtcgcctggatcttagctgaagtccctgatggagagaatgtgggctttgaccccttcctcttttctgttggttcctgggaaaattatgatcaagaactccaagactccaacagacaccttttatccattacaaccaaccttgtcgacgtggcatgggggtcagagaggcccccagtgccaagccaacccatttatgccctgccaaaagaatttacaggaagcacttggcaggaaaaagtatccgccatccgaagctatatgcagaaccacaccatggctccaactggggttcttctatccgcactcgatgagacagcctggctcttcaacctccgtagcagtgacatcccctataaccccttcttctactcctatacgctgctcacggactcttccatcaggttgtttgtcaacaagagtcgctttagcctggagaccctgcagtacctgaatacaaactgcacactacccatgtgtgtacaacttgaagactacagtcaaattcgtgatggtgtgaaagcctatgcttcaggcaatgtgaaaatcttgattgggatcagctataccacctatggggtctatgatgtgataccaaaggaaaaactcgtgacagagacctactccccagtgatgttaatcaaggctgtgaagaacagcaaggagcaggccctcttgaaagccagccatgtgcgggacgctgtggctgtgatccagtacttggtctggttggagaagaacgtgcccaaaggcacggtggatgagttttctggagcggaacacattgatcagttacgacggaatgaaaacttctcctctggacccagttttgaaaccatttctgctagtggcctgaacgccgccctggcccattacagcccaacaaaagagctgcaccgtaagctgtccttagatgagatgtacctggtggattctggaggccaatactgggatgggaccacagatatcaccagaacagtacactggggtactcctactgcctttcaaaaggaggcttacacgcgtgtgctgatgggaaacatcgatctgtccagacttgtctttcctgctgctacatcagggagagtggtggaagcctttgctcgaagagccttatgggaagttgggctcaattatggtcatgggacaggccatggcattggtaatttcctctgcgtgcatgagtggccagtggggttccagtataacaacatggccatggccaaaggcatgttcacttccatcgaacctggatactaccaggatggggaatttggaatccgtcttgaagacgtcgccctcgtggtagaagcaaagaccaagtacccagggacctacctgacttttgaattggtatcctttgtaccctatgaccgaaacctcattgatgtcagcctgctgtccccagagcagctccagtacctgaaccgctactaccagaccatccgtgagaacataggcccagaactgcagcgtcgccagctgctggaggaattcgcatggctggagcggcacacagagcccctgtcagccagtgcccctcataccacgtccttggcctctatgtgggtagcctctgcccttgccatcctcagctggagttgctagaggcccccaattctcctgttgactgttgggtttggggattcatttgcttctgctcagctgtcctctctcctgtgtcatacatgtcccacggggccctgatggctcagccactgtcctaaatgtcctccagagccagatcctaggtagcatattctaccttctcccagatgtgcatacctcatcatggacttccacccctgggccctggactagcagagccatatagcctgctacatgggatccctctctcccaaagtaaaggaccctatagggtaatacccctatttatagttcacagggctccatcccatctccactcactggagaaggccagggctattgccacccacactgactccagactttctaaagctgcctctggccacccttacctgcaggcctaccgtagcctgtttgctatctttggagaaggaggtgactgtgtattctggtctcaaactaccactctagtattagggagaacagaaaagctgaaagtcaactgtggcctgcaattgaacacctcagttgatgatgggtatcagtcctctccccaactgtgaacccacaactccttaactaccaatgcaccccttaacaagccaccacgcagggagttaaggcacaggacttagactgtgaagtagaagagagaatggaaaggtgttctgggctatcccagactcccctgacacttaatcttctaaggtgaagtcaccatgacagtgctattaaaccctctcatatctttaaaaaaagacgctt

SEQ ID NO: 1181 - DNA, 1569 bp, Rattus norvegicus
  Genbank Accession No. NM_057194
agtgctggctcgcgtcatccagagtgagtccctctgcgaggctttagggagagctgtgcgacagctgcaccactagcaaggggttgggactcacgactgccaggagccagctgtccaccttgcagacctcagagcagaaggagcctcagtttaaatcatggagaagcacggaccaccagaacatgctgcttaccccattcctcaggctgactaccaagggtcccagggtccctatccaggaccgcagggtccatatccagggccccagggtccctatgcagggcctcaaggtccctatccagggccccagggtccctatgcagggccccaaggtccctatccagggccccaacctggctacccagttccaccaggcagttatgcaggtggtgacccaagtggctttcctgtccaacatcagccggcgtataatcacccaggtggacctgggggcaccccatggatgcaagcaccacctccacccctggactgtccgcctgggctggaatacttaacgcagatagatcagattctggttcatcagcagattgaacttctggaagtcttaacaggctttgaaacaaataacaaatatgaaatcaagaacagccttgggcagagggtttactttgcggtggaagatacggactgctgcactcgaaactgctgtggggcgtctagaccgttcaccttgaggatcctggataacatgggccgagaagtcatgactctggagagacccctgagatgcagtagctgctgcttcccctgctgcctccaggagatagaaatccaggctcctcctggggtgccagtaggttatgtgattcagacctggcacccatgtctgccaaagttcactctccaaaatgagaagaggcaggacgttctaaaggtcgttggtccgtgtgttgtgtgtagctgctgttcagacattgactttgagctcaaatctctagatgaggaatccgttgttggcaaaatttccaagcagtggtctggttttgtgagagaggccttcacggatgcagataacttcgggatccagttcccgctggacctggatgtgaagatgaaagctgtgatgcttggcgcttgtttcctcatagatttcatgttttttgaaagaactggaaatgaggaacaaaggtcaggagtatggtagtagtttcccaagattcctcggctgtaaggactgcatgccgatagacgctgagaggagatcaaggaatcaaaggaacgcaccatggcttcttttcctttactgaaataactttatatcaattaacctgtgatggctgtaggcccttttgtacaattgtgctctcaaattagagtttattttctgtaactctgtcatgtatttgtttttatacattcttaaggttgtcactgtgaatttgtgaaaaaaatatatgaatttatcaacatagaaatgatcttgtctatgaaaagaggctttgacttagtctttcattcattttcatttttatgaaaacttaaatatattgttatttaatataaagctacatattaaatgtaatttaatttaaaaaaaaaaaaaaaaaa

SEQ ID NO: 1182 - DNA, 1109 bp, Rattus norvegicus
  Genbank Accession No. NM_057197
gaattccctgctgcaaacatggcgctgctggcccgtgcgttctttgctggggtgtcccgcctcccctgcgatcccggtcctcagaagtttttcagctttggaacgaaaaccctgtatcaaagcatcgatgctccacagtctaaattcttcccacccattttaaagcctatgctaccacctaatgcctttcaaggaaaagtggctttcatcacgggaggaggcactggccttggcaaggcaatgacaactttccgctccagcctgggtgcccagtgtgtgatcgcgagcaggaatattgatgttctgaaagctactgcagaagagattacttctaaaactggaaataaggtctatgcgattcggtgtgacgttcgagatcctgatatggtacacaacacagtactggagctgatcaaagttgcagggcatcctgatgtggtgataaacaatgcggcagggaacttcatttctcccagtgagagactgtctcccaatggttggaggaccataactgacatagttctcaatggtacagcctatgtgacgatagaaattggaaagcagctaattaaagcacagaaaggagtcgcctttcttgctatcactacgatctatgctgagagcggatcaggctttgtaatgccaagttcttcagccaaatcaggcgtggaagccatgaataagtctcttgcagctgaatggggtagatacggaatgcgtttcaacataattcagccagggcctatcaaaaccaaaggtgcctttagccgtttggacccgactggaaaatttgagaaagatatgatcgagagaatcccctgtggtcggctgggaactgtggaggaacttgccaatctagcgactttcctttgcagtgattatgcctcttggatcaatggggcagtcattcgatttgacggtggagaggaagtgtttctgtcaggtgaattcaactctctaaagaaggtcaccaaggaggagtgggatgtaatcgaaggcctcatcagaaagacaaaaggctcctaagacgttcatggcttcctctgtgacaaactaaagtttagggactatatagatggacatttgagttaataaattttttgtctgat

SEQ ID NO: 1183 - DNA, 2799 bp, Rattus norvegicus
  Genbank Accession No. NM_057209
ggtcgaccagctagaacgccttgagttcagacacgcagaagcacacgcctacctacctcatggctacagaaaacggagcagttgagctgggaacccagagtctgtcaacagaccacccacctacagacgcagcaggtgatggatctccagcttcagagaaagaacccagcctcccagacacagagaaagacctgggccccactaacacgaagaaagaccctggcgcgccggatccaaagaaaaatccagatccaccctccctgaagaaaactcccgaagcccctggtccagagaaaaagggtgactcggccccagcttcagccagcaaccagggcccttcaggagagggtgatggaggtgggggccctgctgaaggcggtacggggcctcctgcagtcttgccccagcccactgccacagctgatgccagcatccagaagctggacgccacgcaagcgccctcgggcaaccaggaatctggagaggccaaggcaggcaagaaggcagcagaatgccgagaagcaggacgaaggggctcacccgcctttcttcacagccctagctgccccgcgatcatctcctgttctgagaagacactggccatgaagcccttaagcgagacaacagagctcatctttgcaggggtgtctgaaacccctgatccccaagatcctggtccagctaaggacgaaggagggacgaacacgctggcagacgggaaagaagaggcagaggcaggccaggctgagcaggctaaggtgcaaggggacacctcccagaggatcgggttccaggctgttccctcagagagagcagaggtggggcaggccctctgtctcacggccaaggaggaagactgcttccaaattctggatgattgtccaccacccccagcccccttcccacacaggatcgtggagctgaggaccggaaatgtcagcagtgaattcagcatgaactcaaaggaggcattgggaggtggcaagtttggagctgtgtgcacctgcacggagagatccacaggcctcaagctggcagccaaggtcatcaagaaacagacccccaaggacaaggaaatggtgttgctggagatcgaggtcatgaaccagctgaaccaccgcaatttgatccagctgtactcagccattgagacctctcacgagatcatcctgttcatggagtacattgagggcggcgagctctttgagaggatcgtggatgaggactaccaactgacggaagtggataccatggtgttcgtcaggcagatctgcgacgggatcctcttcatgcacaagatgagggtcctgcacttggacctcaagccagagaacatcctgtgtgtgaataccaccgggcacttggtgaagataattgacttcggcctggcaagaaggtataaccccaatgagaagctgaaggtgaattttgggaccccggagttcctgtcaccagaggtggtgaactatgaccagatctctgacaagacggacatgtggagtcttggggtgatcacctacatgctactgagtggcctctctcccttcctgggcgacgatgacacggagaccctaaacaacgtcctgtctgccaactggtactttgatgaggagacttttgaagctgtgtcagacgaggccaaagacttcgtttccaatcttatcacgaaggaccagagtgccagaatgagtgctgagcagtgcctcgcccacccctggctcaacaacctggcagaaaaagccaagcgctgcaaccgtcgtctcaagtcccagatcctgcttaagaaatacctcatgaagaggcgctggaagaaaaacttcattgctgtcagcgcacgcaatcgcttcaagaagatcagtagctcgggggcactgatggctttgggggtctgaaccccaggcgactaaaagcctggatgcactcgcatggtcaaggctgaaaccagagagagccggccagatctctagagcaggctggtcaggacaaatctgcaccaggcccagaggcttggggctccgcaggtccttaggcttaccgcttcccctacgtgaacatggagtgtggcctggaatccatctgtgaccgcctcctcagcaggctgtgtgaccgcttccccctacgtgaacatggagtgtggcctggaatccactctgtgaccgcctcctcagcaggctgtgcctgtcagccccaccagactccaaggacagccaggccaggccattcctagtctctccctagcttgcccctttgaactgctgccccgtaacctttttttcctgcacctggggcactcttgccctggagcgggatggccgggggtccagcaggtgggctgctgtagtggtggtggtggatgggagattctaggagggtagaaatgcagtcagctgcaggggagacagagcaggctttgtgtgagaggacctccatgccctgcctcacactcccaacagatacaaccttgcacacaccatctggctcctggctcccaccttctgtttgtgaccaccaacacataggaacttgtgagagaaagccagcccaggcctggagaggtggtggtggtagcggagagaagtctgggaggcctgagaaccacccccctaagtttacttgaggaccgagtcttccatcctggctactctgtacccatcccaggggcatctgaaaaccccaaataacaggatgaactggccacaaggagtatgaaagccgtcggggcagacccccaaccgctctcagcttgtgccttataaataaacacacaggttggaggcagcctccttcctctgcgcatgc

SEQ ID NO: 1184 - DNA, 2721 bp, Rattus norvegicus
  Genbank Accession No. NM_057211
gcggccgtcggcggacgcgggaagaagtgtcttgtaggcgcggcgccccactcagccccggcccccctcatccgcgtactcggctgatgcctcagggcgtcagctcggcggagaggcggtcgaggcgtgcgcctggctagcagttggctttccccgtgactcggacacgtttgcagtcgaataaacttgcgaccgccacgtgtggcatctctccaaggaaccggctcaggaggagggcgcgcccatcgtgggatcgcgcggggcgcccggcagggcggcggcgacagcggcagagccggccgcggctgctgcgtgcggaggcgctgccggttacgtaaagatgaggggctgaggtcgcctcggcgctcccgcgagtcgcaagctcccgcgcccccgccccctcggccgcgccgcaccgcgctcgtcgtccgagaccagggcagggctagccgaagctccgcagccaccctcaagtttggccgcaccgcccgggctgccgtcgcccgcaccatgtccgcggccgcctacatggacttcgtggctgcccagtgtctggtttccatctccaaccgcgccgctgtgccggagcacgggggcgctccggacgccgagcgactgcgactacctgagcgcgaggtgaccaaggaacacggtgacccgggggacacctggaaggattattgcacactggtcaccatcgccaagagcttgttggacctgaacaaataccgacccatccagaccccctcggtgtgcagcgacagtctggagagtcccgatgaggatataggatccgacagcgacgtgaccaccgaatctgggtcgagtccttcccacagcccggaggagagacaggattctggcagcgcgcccagcccgctctccctcctccactctggagtggcttcgaaggggaaacacgcctccgaaaagaggcacaagtgcccctacagtggctgtgggaaagtctatggaaaatcctcccatcttaaagcccattacagagtgcatacaggtgaacggcccttcccctgcacgtggccagactgccttaaaaagttctcgcgctcggacgagctgacccgccactaccggacccacactggcgagaagcagttccgctgtccgctgtgtgagaagagattcatgaggagtgaccacctcaccaagcatgcccggcgccacaccgacttccaccccagcatgatcaagagatcaaaaaaggctcttgccagccccttgtgaggtgctccccatatggcaaccaggcagagatggtcccggaaggacagagctcccaggaaacagacggacacatggaaatctgccaccgcagagttgtgctggccacaggaggtcactgctctttggtcaatattctgacactctccctgcgctgtttccaaaaagcacacggtagcctaagatcaaagtcaacatttggtccccttgcagaggccactctgaaccgtctctgactgttggagggcaggcaaataaatgcttttggtattttctcctttgttttggggggtggggggagggggcaaggccaagacttggggtaggatttttgaagattcaggctggtgtacatacgtctgactgggtgagttgacccctggcctcccacagtgactctggatccttgatgcttgctgactctcagaattgtttttcttctctctcaatgtcacgaccagagtgcttcagcttgtttagcagagccactctcgaatcacgttaacttttgagatttaaaaaacaaaacaaaacaacaaaaaaaaaaaaaaacccctccatagcacagctgtcttttatgcaagcaagagcacacctactccagcatgatctgtcatctaaggacttcaaaacaaaacaaaacaaaaaaaaaagttacttatagtcagtggataagcagagtccgaatttacactaaacaagacagaccttcgaggggtcataagtccggaactttcaaaccttgcttcgtatgaatcgtactatctgaacataaactgcacttttattttctaataccgagggtgaatacggtaaatccatgccttgagggtagaagccgacattctgtttggcacacgttattatctgcttattttccaggatacacatttccctgagaacccacggcagagatgtgagggcagaatgtatggaaacacatgctgaggaggggaaggaggaggggagtgctttaaagatacaaaaaaaaaaaaaaaaaaaaaaagagcaaacaattttaacttcatgaatttgtttgaattttcccaagcttcagataacaacgccactcacgggactaggacgctgcaagagcattgggctctgtgtagcattagctgataaatgggtgtatagccatcaccagacctggaaatgcccccttttggtgggggtgggggtgtttcttggtctctctttcgttcctatgaaatttccactaagaggtgcaagagttatatcaaaggaaagggaactgaaatatggaaaaaaaaaagtttgcccctgtaagtagtctctagggaaggaagatgccacaatggtttcagaggcgactctgcagaacagtcccttctgctgaacataggtcagagaaacactcgtgaatggcatcacatcgccaactgtctgcatcatggcccaccactacttagcttgtatctcggtgtctacacaatggcctgaaccactggtcaccat

SEQ ID NO: 1185 - DNA, 1454 bp, Rattus norvegicus
  Genbank Accession No. NM_078623
gtctctccgccatggcggccctgcgtgctctgctgcccagagcctgcaactcgctgttgtccccagttcgctgcccagaattccggcgcttcgcctcgggtgctaactttcagtacatcatcacggaaaagaaaggaaagaatagcagcgtggggctgatccagttgaaccgtcccaaagcactcaatgcactttgcaatggactgattgaggagctcaaccaagcactggagacctttgaggaagatcccgctgtgggcgccattgtgctcactggtggggagaaggcctttgcagccggagctgacatcaaggaaatgcagaaccggacatttcaggactgttactcaggcaagttcctgagccactgggaccatatcacccggatcaagaaaccggtcatcgcggctgtcaatggctatgctcttggtgggggctgtgaacttgccatgatgtgcgatatcatctatgctggtgagaaagcccagtttggacagccagaaatcctcctggggaccatcccaggtgcagggggcactcagagactcacccgagcagtcggcaaatcactagcaatggagatggtcctcactggtgaccgaatttcagcacaggatgccaagcaagcaggtcttgtaagcaagatttttcccgttgaaacactggttgaagaggccatccaatgtgcagaaaagatcgccaacaattccaagatcatagtagccatggcgaaagaatctgtgaatgcagcctttgaaatgacgttaacagaaggaaataagctggagaagaagctcttctattccacctttgccactgatgaccggagagaagggatgtctgcctttgtggagaaaaggaaggccaacttcaaagaccactgagagctggcagccatacctttctccaccctggagaggaaagctcagcctgtcagagggtagtagtgtctgccacagttcctaccgaagcttcaaggctgtggccacagcttgggtactcctggtgtggcctgcaaccttcaccagttgttggaagtcggtctctcacagttttctaaatcagaaatctgggaagctttcagggtgtcttgatttgtttaacttcactctaaaggcagggcacgcttgggccagccacttccctgtgcactatctgcagtgcatagctcaagatgtgagcttcaagagggaagtggccctgcctgctgattccaagcacgagaattcaatgaaagtaactccttcggtttagtttcgactcgcctgtagttgtctctctagagggtcaatatgttttttaattattattgctatgattttcttatgggtagggttttgctgtgtatccctggctgcctggaagttactgtatagaccaggttgaccttgaattcacagagatcaaccagcctctgcttcccaagtattgggattaaaggtatatgctaccac

SEQ ID NO: 1186 - DNA, 1107 bp, Rattus norvegicus
  Genbank Accession No. NM_080399
aaggcatttcaacatcaatattattctattagtccagtagatagtagctaagtttcaaattctgtgttaatcaaaatttaaaaatatgattaagtcatattaggattacaacaaagagatgtaatctttaaagtctaccaatacatttaaatgagcagtatacagtatgtactaaataccatgccaggaaatggagaaaatgtactgtatttatagagtatattgaaaagttctgggagaaatttagatatgagctctatcttcgcacatttcagaaaataaggttaacagcaaacaggtattgctgtttatagataatctatgactgtaaagtttgtatggatttagaaattaaattagccttcagcgtctggtgaaatcccgcagcgtctagggaaagatccgttctgctccgcgagggaaacagagccgttgaccatggttgcaacgggcagtttgagcagtaagaacacggccagcatttcagagttgctggacggtggctctcaccctgggagtctgctaagtgatttcgactactgggattatgtcgtccctgagcccaacctcaacgaggtggtgtttgaagagacaacatgccagaatttggttaaaatgttggagaactgtctgtccaagtcaaagcaaaccaaactcggttgctctaaggtcctggttcctgagaaactgacccagagaattgcccaagatgtcctgcggctctcatccacagagccctgcggccttcggggctgtgttatgcacgtgaacttggaaattgaaaatgtgtgtaaaaagctggataggattgtgtgtgatgctagtgtggtgccgacctttgagctcacgctggtgttcaagcaggagagctgctcctggaccagcctcaaggacttcttctttagcggaggtcgcttctcgtcgggccttaggcgaactctgatcctcagctcgggatttcgacttgttaagaaaaaactgtactctctgattggaacgacagtcattgaggagtgctgaggaggaaaaaacaattaaaggtccctaatgagtggctaataaacctctggagctatccagcaaaaaaaaaaaaaaaaaaaaaaaaaa

SEQ ID NO: 1187 - DNA, 5174 bp, Rattus norvegicus
  Genbank Accession No. NM_080581
gggttgagctgaactgagatcccaagaccagcggtgcaccagagccacatggaccgcttgtgcggctccggggagctgggctccaagttctgggactccaacctgactgtatataccaacactccagacctcacaccctgtttccagaactccttgctggcctgggttccctgcatctatctgtgggctgccttgccctgctacctgttctacctgaggcaccatcggcttggctacatagtcctctcatgcttatccaggctcaagacggccctcggtgttctgctgtggtgtatctcatgggtggacctgttctactccttccatggcctggttcacggctcatcccctgctcctgtcttctttatcacacccttgttggtggggatcaccatgctgctggccacattgctaatccagtatgagcggcttcggggcgtgcggtcttcaggtgtgctcatcatcttctggctcctgtgtgtgatctgtgccatcatccccttccgttccaagatcctcttggctttggcagagggtaaaatcttggatccgttccgattcaccactttctacatctacttcgccctcgtgctgtgtgccttcatcctgtcctgcttccaggagaagccgcctttgttttccccagagaatcttgacacaaatccttgcccagaggccagcgctggcttcttctcccgtctgtctttctggtggttcacaaagcttgccatccttggctaccgacgtcccctggaggacagtgacctctggtctctgtctgaggaggactgctctcacaaggtggtacaacggctactggaagcatggcaaaagcagcagacccaagcatcagggccccagactgcagcccttgagccaaagatcgcaggtgaggatgaggtcctgctgaaggcccgccccaagaccaagaagccttcctttctgagggctttggtgagaaccttcacctccagcttgctcatgggtgcctgcttcaagctgatccaggacctgctctccttcatcaacccacagctgctcagcatcctcatcaggtttatttctgaccccacggcccctacctggtggggcttcttgctggccggactgatgttcgtgagctccaccatgcagacattgatcttacaccaacattaccactgcatctttgtgatggccttgaggatacggactgctatcataggcgtcatctacaggaaggctctgaccatcaccaactcagtcaaacgtgagtacactgtgggagaaatggtcaacctcatgtcggtggacgcccagcgcttcatggatgtctccccattcatcaacctgctgtggtctgcacctttgcaggtcatcctggcgatatacttcctctggcagatcttaggcccatcagccctggctggggtggctgtgatagtcttgctgataccactcaatggagctgtgtccatgaaaatgaagacctaccaggtacagcaaatgaagttcaaagactcccgcatcaaactgatgagtgagatcctgaatggcatcaaagttctgaagctgtacgcttgggagcccaccttcttggagcaggtagaaggaatcaggcagggtgagctccagctactgcggaagggcgcctacctgcaggctatctctaccttcatctgggtctgcaccccgtttatggtgaccctgatcaccctcggggtgtacgtgtgtgtggacaagaacaatgtgctggatgctgagaaggccttcgtgtccctgtccttgttcaatatcttaaagatccccctcaacctgctgcctcagttaatcagtggcatgacccagaccagcgtgtctctgaaacggatccaggatttcctgaaccaagatgaacttgacccccagtgtgtggaaagaaagaccatctccccaggccgtgccatcaccatacacaacggcaccttctcctggtccaaggacctgcctcccacccttcacagcctaaacattcaaatcccgaagggggcattggtggctgtggtgggacctgtgggctgtgggaagtcttccctggtgtctgccttgctcggagagatggagaagctggaaggtgcagtgtctgtaaagggctctgtggcctacgtgccccagcaggcgtggatccagaactgcacacttcaggaaaatgtgctatttggccaacccatgaaccccaagcgctaccaacaggctctggagacgtgtgccctgctagctgacctagatgtgcttcctggtggggaccagacagagattggagagaagggcattaacctatctggaggccagcgacaacgggtgagtttggcccgagctgtttatagtgacgccaacatttttttgctggatgacccactgtcggctgtggactctcacgtggctaagcatatcttcgaccaagtgattggaccagaaggtgtgctggcaggcaagactcgggtgctggtaacccatggcatcagcttcctgccccagacggactttatcattgtgcttgctgacggacagattactgagatgggtcactactccgaactcctgcagcacgatggctcctttgccaacttcctccgaaactatgcaccagatgaaaaccaggaggccaatgaaggagtcttgcaacatgcaaatgaggaggtgctcctgcttgaagacacactcagcacccacacagacctgacagacaccgagccagccatatacgaggtccgcaagcagttcatgagagagatgagctccttgtcttctgaaggagagggccagaaccggcctgtgctcaagagatatacgagttcactggagaaggaggtgccggcgacacagactaaagagactggtgcattaatcaaagaggagatcgcagagacaggcaatgtgaagctgagcgtgtactgggattatgccaagtctgtggggctctgcaccacgctgtttatctgcctcctgtatgctggccaaaatgcggttgctatcggagccaatgtgtggctcagtgcctggaccaatgatgtggaggaacatggccagcagaacaacacctccgtaaggctgggagtctacgccaccctaggaatactgcaagggctcctggtcatgctgtcggccttcaccatggtggttggcgctatccaggctgcccgcctgctgcacacagctctgttgcacaaccagatccgtgcgcctcagtccttctttgacacgacgccctcaggccgcatcctcaatcgtttctccaaggacatatacgtcatcgatgaggttctggcccccaccatcctcatgctgttcaattcattctacacatccatctccaccattgtggtcatcgtggccagcacgccactcttctgcgtggttgttcttcctctggctgtgttctatggcttcgtgcagcgcttctatgtggccacatcgaggcagctgaagagactggaatccgttagccgctcgcccatcttctcccacttctcggagacagtaactggcaccagtgtcattcgggcctacggccgagtccaagacttcaaggtcctcagtgatgctaaggtggatagcaaccagaagaccacttatccttacatcgcctccaaccggtggctgggtgtccacgtggagtttgtggggaactgcgtggtgctcttctccgcgctgtttgcagtgatcgggagaaacagcttgaatccagggcttgtgggtctttccgtgtcctatgccttacaggtgaccttgagtttgaattggatgatacggacgctatccgacctggagtctaatatcatagccgtggagagagtcaaggagtactctaagacggagactgaggctccctgggtgttggagagcaaccgtgctccagaaggctggcccaggagtggggtggtagagttccggaactattcggtgcggtaccgcccgggcctcgagttggtgctgaagaatttgactctgcatgtgcagggtggggagaaggtaggcatcgtgggccgcactggggctggcaaatcttccatgactctttgcctattccgaatcctggaggccgcagagggtgagatcttcattgacgggctcaatgtggcacacattggcctccatgacctgcgttcacaactcaccatcatccctcaggaccccatcctgttctcgggcacgctgcgcatgaacctcgatccctttggccgttactcggacgaggacatctggaggaccctggagctatcccacctgagtgcatttgtgagcagccagccgacaggcctggattttcagtgctctgagggtggggataatctcagtgttggccagaggcagctcgtgtgcctagcccgagccctgctccgaaagagccgtgtcctggttttagacgaggccaccgctgccattgacctggagactgatgacctcatccagggtaccatccgtacccagtttgaagactgcactgtactgaccatcgcccaccggctcaacacaatcatggactacaaccgggtcctggtcttggacaaaggagtagtagctgaatttgattctccagtaaacctcattgcagctggaggcatcttctatgggatggccaaagatgcaggactcgcctagaatctgcattccaaaggtttcttccttgtctgaatcggacagcaagtagctgcagcatggatttgatggcaacgagtggggacatttgagttggttttggtttttttttgttttttgttttttttttttttttaaattctgcaaattgccttacagactagccatacttaacagtggaatgaggaagtgggtccttggaggtcacagccagttcacagccaagttcagaccagtccctgggtctcctagacctagtctaccattattcccgtactgcatttttttttggttctttttttcagagctggggaccgaacccagggccttgcccttcctaggtaagcgctctaccactgagctaaatccccagcccccgtactgcagtttttaagagaccctgctcctgcctctacatattcatagtttccaattttttttttaaatgagcctttctccttctggaccagggactgctaggtcagtctgtccggggaacagaatccctggttggtgctgtctgaatccactgacgaaataaagccatgagcagcagc

SEQ ID NO: 1188 - DNA, 3219 bp, Rattus norvegicus
  Genbank Accession No. NM_080888
ccgaccatgtctcacttagtcgagccgccgccgcccctgcacaacaacaacaacaactgcgaggaaggggagcagtccctgccgccgcccgctggcctcaacagttcctgggtggagctacccatgaacagcagcaatggcaacggtaatggaaatgggaagaatgggggcctggagcacgttccttcctcgtcttccatccacaatggagacatggagaagatccttctggatgcgcagcatgagtcgggacagagcagctcaagaggcagttctcactgtgacagcccttcaccacaagaagacgggcaaataatgtttgatgttgagatgcacaccagcagggaccacagctctcagtcagaagaagaagttgtagatggagaaaaagaagttgaggctttgaagaaaagtgcagactgggtatcagactggtccagtagacccgaaaacatcccacccaaagagttccatttcagacaccctaagcgtgcagcctctctaagcatgaggaagagtggagccatgaagaaagggggcattttctctgcagagttcctgaaggtcttcatcccatctctcttcctctctcacgtgttggctttggggctgggcatctatatcggaaaacgactgagcacaccttctgccagcacctactgagggagacgaaaagcccctgggaatccgtgtggcctgtgaagtggtgtattgtagtttgaatttgagacctattgtaagcatgatccccacctacaaccctatttttacatgcccaattccaagtaactctcaaatccagtattttactcaaactctgttggggcattttactaaccttgttccctttttggcctgtaaaacactttagagattcctaacagagtttactgttgtttagaaatttgcaagggcttttttcagcaacgccaccagcagattataatcttgtcaacagtgcatcgtctcctcttagtaccactagtcacacctgcatcattcatgctagaagctgtgttctagccatgcaattacatctctttctaaatgaggtcaggtttgcaaataatactatgaaagctttgtttagtctttgttttgttttccaggacaaaaacaagcttccctgagcttgagtttataaaatgaaaacaaaccaaaaaaaggaaaaaaaaaaaaaaaaaaaaaaaaaaaaaaagaaggcaaaacacaagcaaaaaaaaaatcctgggcaataaaaattactttaaagcagctctggagcccctctttcctcatcctcctgccgccctgaatgggtaggagacagctgtgtgagggacagacaggagagaggagaggagagcatgctcgcaggtttaacatcagtatattgcaatgctgtcttttctatggtagagaatctttatttgtaaggagtgtctcaggcctagacatacatgaaacttacttttgagattttcatgcgtttggtattttcatgtgttaactgcatgtgaatttttcatgactttctttgtttttctagtttctttttttctaagaagagacttggaacgagtctgattcatggtgttaatagaggcttcttgttttaggaagctttgcttacactctggagcctttacactctgaagaataacttcagagttattccaagtacttgtgtaacttggaaaagtagacttgggttgtgggaacagttgataaagttctggaaagatgccattcactctctttgggtccttacttcctgttgttgcctacagtcttcccaaggtctccttagtctctcccaggcccctgtgactgtcttacgtaagtgtcttctcagttctgtcaaattcctgatgctctatagcactcagaaaattctttgaatggcagactttcttctgtctgtttctaaaatgtgaagctttaggaccaaattgctagtatcaggattgcagattatctcaagtagattttgttagatttcagagcacagcatcactctgagggaatctgtgtcttatatataaataattactgttaatgatgtacactttgctgaagttatagaaccattgtgaatttcaaggctagcaacctacacggtgcaccaggttgacttgaataaatttggcaaccaggtttgccagcatgcagaaactcactcttctctcacataaagggttataaaattggtgtgttatatggaaatggaaaggaaggtagataagacatttctgtcatttttcaagaacatggctgtttatctttaaggcagataatatatccaaaatagttttgtgagttattttctttctggcatttaatgtctacctgatttgagggcaacttctgcccttttcctttcttgctcttaaacctggtgatgcttgatctgccttctcacctattacttcaagtgtttataattgagtttcttaggaagaaagcaaatctggtggcctgttgttttgttgttgtttttcaaattgtcaggactgctgaggctaacctgcagcacagtttgcagcactgacgtgtgagcagagcagaatcactctttaatgctcttataggcggacatcacctctctaaattcagtagcagtttcatcggcagtgccattgaactgtgggaacatttatgattttgtctcaaccttaaaactaaatttagttttgccagtttttgaaagtatcaataaaatcatggaatatgtcccagagcaactgtccatcagtgagcatgtacgatgtcgatttgcggttccaacatacaggatgttcatgctcctacacagattcttgttgagtgaaaacagattgccctatcacaaagcaggattcaacagagttgaaatttaagataaggtttaaaaagctttattcctgtttacaatttgggatgaaaagcaggcttcgttctaagtttattgaaacctggctcagatgtttgtaggtcaagagaaaagcggcacagagacagcacagtgagtcactcaattgcagtaaagagtgaaatggagacagcccgtgagacgaatctcacagtgaagcgtttgttggacctcctggtattaatggagccagagtgacatgcatccttcgtctgtctcttcgtcagcactggcgtcattcctttcagtttaaagaacacatgtaacttgtagctataaacattttgtgccattaaagctctcacaaaacttaaaaaaaaaaaaaaaaa

SEQ ID NO: 1189 - DNA, 1861 bp, Rattus norvegicus
  Genbank Accession No. NM_080903
aaaggttcggggaggaagacaaagaggatccgagtgggatcccttccactcggtgtgacgcaggtggaagagacagtcgcagtttcgaagcaatatggattataaatctggcttgattccggacggaaatgctatggagaacctggagaagcagctcatctgccccatctgccttgagatgtttaccaagcctgtggtcatcctgccctgccagcacaacctctgccggaagtgtgccaacgacatcttccaggctgccaatccctactggaccaaccgcggtggctcggtgtccatgtctggaggtcgtttccgctgcccctcgtgccgccatgaagtgatcatggaccggcatggggtgtacggtctgcagaggaacctgctggtggagaacatcatcgacatctacaagcaggaatgctccagtcggcccctgcagaaaggcagccacccgatgtgcaaggaacacgaagacgagaaaatcaacatctactgtctcacgtgcgaggtgcctacttgctccttgtgcaaggtgttcggggctcaccaggcctgtgaagttgcccccttacaaagcatcttccaaggacagaagactgaactgagcaattgcatctccatgctggtggcagggaacgaccgagttcagactatcatctcgcagctggaggactcctgccgagtgaccaaggaaaacagccaccaggtgaaggaggaactgagccacaagtttgacgccctctacgccatcctggacgagaagaagagtgagctgctgcagcggatcactcaggagcaggaggagaagctggacttcatcgaggccctgatcctccagtaccgagagcagttggaaaagtcgaccaagcttgtggaaacagccatccagtccctggatgagcccggaggggccaccttcctcttgagtgccaagccgctcatcaagagcattgtagaagcttccaagggctgccagctggggaagacagaacaaggctttgagaacatggactactttactctgaatttagaacacatagcagaggccttgagggccatcgactttgggacagatgaggaggaggagtttactgaagaggaggaggaggaggatcaagaagagggcgtgtccacagagggacaccaatgaagaactggatgagtgagacgccctctggatgcagagatgggggaggggcgggacaggcccatctcgggatggggttagggctccttgggggcaccatagggaagtgtgtcttctctctgctcagagagcagggactagcatagaagccccaccattgtgtccagcagctgctgaaacacgattggaaatgtatccaaaaatgtcccaggacacttttttacgttggtgcaaaatgaaatattttgtatgtttttaaaatgtgatttttgtataaacttgtatatgtatgccaatttggtgctttttgtacaagaacttttgtatgatcatgcctggtcattgtgtgaccagcgattgtcacaaagggggaaggaagccaagttcattgagctgcccacttcctttccttggcgggagggttgggtctcactcaaaggcctagaaaggggcaatgtactgtacttcagtacccatccccaaacacggggagaggactgaatttgtgttatatgttgttttaataaatgcagaaggggctgggtattgggggtgcacaccctttgatcccagcactctggaggcagaggcagttggatctctatgagttcgaggctagcctggtctacatggagagttccagaccagccagggcaacatagagagactttctgtctcaaaaataaaaaaataaaaaactttccagcacaatgg

SEQ ID NO: 1190 - DNA, 2655 bp, Rattus norvegicus
  Genbank Accession No. NM_130405
gccctttccacccccgccaaccgccgctcgggcctcagcgccgtcgcgtcgcttcctcgctcgctcgccacacatcattcctgatgcagcgccgggacgaccctgccgcgcgcctcacccggtcctcgggccgcagctgctccaaggacccgtcaggtgcccacccctcggtgcgtctgaccccgtctcggccgtcgccgcttcctcaccggtcccggggaggcggaggtgggcccagaggaggcgctcgggcctcgcccgctacgcagccgccgccgctgctgcctccctctaatccgggtcccgacgcgactgtggtgggttccgcgccgaccccgctactgcccccgtcagccacagccgcggccaagatggagccggagaataagtacctgcctgaactcatggctgagaaggactcgctcgacccgtccttcactcacgccatgcagctgctgtccgtagaaattgagaagattcagaagggagagtcaaaaaaagatgacgaggagaattatttggacttattttctcataagaacatgaagctgaaagagcgggtactgatccctgtcaagcagtatccaaagttcaattttgtggggaagattcttggaccacaaggaaatacaatcaaaagactccaggaagagactggtgcaaagatctctgtcttggggaagggttcgatgagagacaaagccaaggaggaagagttgcgcaagggtggagaccccaaatatgcccatttaaatatggatctgcatgtcttcattgaagtctttggacccccatgtgaagcttatgctcttatggcccatgctatggaagaagtcaagaaatttctagtaccagacatgatggatgatatctgccaggagcagtttctagaattgtcctacttgaatggagttcctgaaccctctcgtggtcgtggggtgtctgtgagaggacgaggagctgcccctcctcctccacctgttcccagaggacgtggtgttgggccacctagaggggctttggttcgtggaaccccagtaagaggctccatcaccagaggtgccactgtgactcgaggggtgccacccccacctactgtgaggggtgctccaacaccgagagctcggacagctggtattcagagaatacctttgcctccaacacctgcaccagaaacatacgaagattatggatatgatgattcatatgcagaacagagctacgaaggctatgaaggctattacagccagagtcaaggggagtcagagtattatgactatggacatggggagcttcaagattcttatgaagcctatggacaagatgactggaatgggaccaggccatcactgaaggctcctccagctaggccagtgaagggagcatacagagagcacccatatggacgttattaaaaacaaacaggaggggaaaatatcagttatgagcaaacttgttactgatttcttgtatcccaggattcctgttgctttacccacaacagacaagtaattgtctaagtgtttttctttgtggtccctttcttttccccaccttcctccattcttaactctgcattctggcttctgtatgtagtattttaaaatgagttaaaatagatttaggaatatcgaattaattttttaagtgtgtagatgctttttttctttgttgtttaaatataaacagtgtaccttttataataaaaaaaagttgagttaaaaaaaaccacaaacatgttagtttcaaaagtggcattgcttgcttaaaggttctgaagtaaaggcttgtcaacgttttcttagctttgatttgaggcaccccgtaaagtcatagttgcagaatcccaaactaggctacatttcaaaattcagggctgcttaagctgtaaaatcacaatgttaacggcagtaggtgccaccatgtaaaagtgagctcagatgtctctaaaaacatttcctttaaaagcacatggcggttgaatcttaaggttaaattttaatatgaaagatcctcatgaattaaatagttgatgcaatttttaacgttaattgacttaaaacaacaacaaaattaggtttgtaaaatgactttttcattctgtgggttttgaaatctagccccagacatacagtgttgagagatacttagtgggggggggggttgaataggttgctggggagggaagctggccgcctaaatggagtctgacagttctttttagccacagtcttttcaataatagtactaataatcaaattttcagtatttaaaatgtcaagagtattttgtccatctgagattctgcactccatgaaaaactcacttggacactggggccgaaagctgacgctgttcattaagttgaccattgtcagtttcgcactgttgcccggtagttaagtatgttcaacactagcatgacataaaaagggacactgcagctgaatgagaagagaatcaaagtccctttgtacataagttaaagtcctaatggatttgtaccgtcctcccattttgtttttggaagattaaatgctacatgtgtaagtctgcctaaataggtagcttaacctatgtcaaaatgtctgcagcaagtttgtcaataaagtttagtccttttttaatcaaaaaaaaaaaaaaaaaaaaaaaaaa

SEQ ID NO: 1191 - DNA, 1386 bp, Rattus norvegicus
  Genbank Accession No. NM_130411
atgagccggcaggtggttcgctccagcaaattccgccacgtgtttggacagccagccaaagctgaccagtgctatgaggatgtgcgcgtctcacaaaccacttgggacagtggcttctgcgctgtcaaccccaagttcatggctctgatctgtgaggccagtgggggaggggccttcctggtgctacccctaggcaagactggacgagtagacaagaatgtgcccctggtgtgcggccacactgcccctgtgctagacatcgcctggtgtccacacaatgacaacgtcattgccagtggctctgaggactgcacagttatggtgtgggagatcccggatgggggcctggtgctgcccttgcgggagcctgttgtcaccttggagggccacaccaagcgggttggcatcgtggcctggcaccccacagcccagaatgtactgctcagcgcaggttgtgacaatgtgatcctggtgtgggatgtgggcactggggcagccgtgctgacgctgggcccggatgtgcacccggacacaatctacagtgtggattggagccgggatggtgctctcatctgtacctcctgccgtgacaagcgtgttcgcgtcatcgagcctcgcaaaggcactgttgtggctgagaaggagcgtcctcatgagggaactcggccagtgcatgctgtgtttgtgtcagaagggaagattctaaccacggggttcagtcgcatgagtgagcggcaggtggcgctgtgggacacaaagcacctggaggagccactgtccctgcaggagctggacacaagcagtggagtcctgctacctttttttgaccctgataccaacatcgtctacctctgtggcaagggtgacagctctatccggtattttgagatcacgtctgaggctccgttcctgcattatctttccatgttcagttccaaggagtctcaacgtggtatgggctacatgcccaaacgtggcctggaagtgaataagtgcgagattgccagattctataagcttcatgagcggaaatgtgagcctattgccatgacagtgcctagaaagtcggacctgttccaggaggacctgtatccacccactgccggacccgaccccgccctcacagctgaggagtggctgagcggtcgtgatgctggccccctcctcatttccctcaaggatggctacgtgcccccaaagagcagggagctgagagtcaacaggggcctggacagtgctcgcagaagagctacaccggagcccagtagcactcttagctcggacaccgtgtcacggctggaggaggatgtgaggaatctcaacgccatagtgcaaaagcttcaagagcgcctggacaggctggaggagactgttcaggccaagtag

SEQ ID NO: 1192 - DNA, 2912 bp, Rattus norvegicus
  Genbank Accession No. NM_130416
aagctgaatcgaattcggcacgaggcagggtcccgcccgggcttgggggcggtccaggcagccagcatcctcgcgccgcccatgcgccacgccctccggccctccctggctccatattgcaggaaagcgggctagggtgtgacgctgctttctggttcagaatgtcatacccaggctaccccccgacaggctacccacctttccctggatatcctcctgcaggtcaggagtcctctttccccacttcgggtcagtatccgtaccctagtggctttccaccaatgggaggaggtgcttacccaccagctccaagtggtggctacccaggagctggaggctacccctcacctggaggttatccagcccctgggggctatcctggaaccctaaatccagggggtcctccatcctatcctggaggtcaaggctttggggccccacctggtggggcaggcttttctggctatccacagccacctgcacagtcttacggcggtggaccagcccaggttccagtcccaggtggctttcctggagggcagatgccatctcagtaccccggaggacagtctccctaccctggccagcctgctgcgatgactcagggcacccaaggaacaatccgcccagccttcaacttcgatgctatgagagatgcagagattctccgcaaggcaatgaaggggtttgggactgatgagcaagcgattgtggatgtcgtgtctaaccgttccaatgaccagaggcaacaaattaaagcagcttttaagaccatgtatggcaaggatttaattaaagatctcaagtcagagttgagtggaaacatggaagaattaatccttgccctgttcatgcctcctacatactatgatgcctggagtttgcggaaggcgatacagggagcaggaactcaagagcgtgtgttgatagagattttgtgcacaagaacaaatcaagaaatccgagacattgttagatgctatcaattagaatttggacgcgagctcgagagggacattagatcggatacctcaggacatttcgaacggctcctcgtgtccatgtgccagggaaaccgtgacgagagcccaagtataaaccaccagatggcccaggaagatgcccagcgcctctatcaggctggggaggggaggctagggacagacgaatcctgtttcaacatgatcctcgccacaaggagcttccctcagctgagagccaccatggaggcttattccaggatggctaatcgagatttgctaagcagtgtgagccgggaattttccggatacgttgaaagcggtttgaagaccatattgcagtgcgccctcaaccgccctgccttcttcgccgagcgactctactattccatgaaaggcgctggaacagatgactccaccctggtcaggattgtggtcactcggagtgagattgacctcgttcagataaaacagatgttcacccagatgtatcagaagactctaagcacgatgattgcaagtgacaccagtggagattacaggaagctgctcctggccatcgttggccagtgacggggatttttttccctttaaggaatgaagctcttcagggcctatctttctgagcaatgagacctgcatgcagccacgtcagacaccaactgaccagagtgcttttccactgaggcctgtcagggggtgtgctgcgtttgcacatgttgtcactgccttaattctaatgttagtctctttctttctgtatccaatcagtgtaaaagccatgtcaatgacatagtaatgtaaatttgtaaagcttcactcccactgctttcactttaatccggatttcaaattaaaaaaaaaggattcaaattaatgaaaaattcacagcaatctctaattctgtgtaacgttaaaagaatgagagaatgagaacggtgttcattctcattaaaacatgccgttctggtttgattgcagaaggtgatattcagttcaggaataagcctccgtgactcacatccatggctaaagtttcctggtacaaagggaataaatctgtctcagctagtaatagtgcaggacggaaaggccatgtggtgttcccctaaatacgacagtctatgcaggcaagcttctcggaggttctggaaatgtcacttggtgttcttgagacccctttccatcccaaggccagcagttgtcagccgttagtaacgcaccacactgtgtggtaggagtgccttgaacaccacacagctctgacagtggtgtcctgtacaaggctggccctcgtggtaaccagcatgtccctgagaccatcgagagcttaactggaagcaggggaaagctcctcctcttcctcctccccctcttcttcctcttcctcctccccctcctcttcctcctccctttattttttcttctttccttccttcttcttcctcatttcctcctttttttctcccccatagcccaggtctttgagtaacctgattacttctgtgttcctacccagtccagtgaatgaggaaaaggcaagcccattttacatttaattgccacaaggaaaattacctttaaaagcctcgttttttggtcttttaacaacaaatcttatgtcgtacgagtggtttgcctgcgttacatgcacatgcacccaaccacttgcatgcctattttcctgaggaggccaggagaggttttggaaaccctgaaatggagattatagatgcttgtaaactagccactcagtgctggcatcggaacccaggtcctctgtgtttggtttattagaatagaaaagtgaaaagctatagtctgagctttgattttaagataaatgtttaaacagtctggtctcatgactttacagaaacaataaaattgtataatacttctttaaaaccacaaaaaaaaaaaaaaaaaaaa

SEQ ID NO: 1193 - DNA, 1448 bp, Rattus norvegicus
  Genbank Accession No. NM_130430
gaattcgcggcgcgtcgacctcaagaggcagaggcacatagagaaaccctatcttgaaaaacgggggagggagaaacaggggcagaatgaaaaagggaggaaggaagaaaggaaggaatgagaaagaaaagtggaaataagtcacgtataaaacgagagttaaagcctacgtcatggggttggggatttagctcagtggtagagcgcttgcctagcaagcgcaaggccctgggttcggtccccagctccggaaaaaaaaaaaaaaaagaaaaaaaaaaaagcctacgtcatcctgtctccacttagctctgccgggtcatctgaaaaccacgtggtctatttagctggagtttccggtgacctcgccccaccttcaaactcagtacttgtgcattggctgaagtattttgtcccttgggaggacccgtagctccagcctcccggtgtccgtagccgggaaacctggcgtccggcgttttaggctgaggtccgcgatgtcgagtgaggaagtccggcaccgggcagagtcctctgaggcccgtgcggccgcggtcagcgacatccaggagctgatgcgacgcaaggaggaaatcgaggcgcagatcaaggctaattacgacgtcctcgagagccaaaaaggaattggcatgaacgagcctctagtggactgcgagggctacccccgggcagatgtggatttgtatcaggtccgaacagcaaggcacaacatcatctgtctccagaatgatcacaaggcactgatgaagcaggtggaggaggccctacaccagctacatgctcgggacaaagagaagcaggctcgggacatggctgaagcccgagaagaggccatgaaccgtaggctggcctcggacagtcccgccctacccaaggcctttgccagagtgaacagtatcagccctggttccccagccagtattgcgggcctgcaagtggatgatgaaattgtggagttcggctctgtgaacacccaaaacttccagtctctgcagaacgtgggcactgtggtgcagcacagcgaggggaagcccctgaatgtcatggtgatccgcagaggggagaagcaccagctcagactgactcccacccgctgggcaggaaaaggactgctgggctgcaatattacccctctccaaagatgactgcttcctgggagctgcaggagagcttcttcagctgggcccgcgcttggcctgggggatttcctcattctctcggctccctcaagtgtaaggatctggaagagagtggcggacgcctgagcgtcgaggtggaagagacgctttggctgcctgatgtagtctctgggttgaggcattattaaaaatgtggtttgtgcttaaaaaaaaaaaaaaaaaaaaaaaaaaaaaaaaaaaaaaaaaaaaaaaaaaaaaaaaaaaaaaaaaaaaaaaaaaaaaaaaaaaaaa

SEQ ID NO: 1194 - DNA, 2524 bp, Rattus norvegicus
  Genbank Accession No. S45392
ggcctaggcttgccgtgcgagtcggacgtggtccgggcccaccctgctctgtactactactcggctttctcgtcaagatgcctgaggaagtgcaccatggagaggaagaggtggagaccttcgcctttcaggcagaaattgcccagctgatgtccctcatcatcaacactttttactcaaacaaagagattttcctccgggagttgatctctaatgcttctgatgccctggacaagattcggtatgagagcctgactgacccttccaagttggacagcgggaaagagctgaagattgacatcatccccaaccctcaggaagccacgctgactttggtggacacaggcattggcatgaccaaggctgacctcataaataacttgggaaccattgctaagtctggtacaaaggcgttcatggaggctctccaggctggtgcagacatctccatgattgggcagtttggtgtcggcttctactctgcctacctggtggcagagaaagtggttgtgatcacgaagcacaacgatgatgagcagtatgcctgggagtcttctgctggtggatccttcactgtccgtgcagaccacggtgagcccattggccggggtaccaaagtgatccttcacctcaaagaagaccagacagagtacttagaggagaggagggtcaaggaggtggtgaagaaacactcacagttcataggctaccccatcaccctctatctggagaaggaacgcgagaaggagatcagtgatgatgaggcagaggaagagaaaggggagaaggaggaggaagataaggaggatgaggagaagcctaagattgaggatgtgggatctgatgaggaggatgacagcggcaaagataagaaaaagaaaacaaagaagatcaaggagaagtacattgaccaggaagagctgaataagacgaagcccatctggaccagaaatcctgatgacatcactcaagaggaatatggtgaattctacaagagcctcaccaatgactgggaagaccacttggcagtcaagcacttctctgtagaagggcagttggaattcagggcattgctcttcattccccggcgagctccctttgacctctttgagaacaagaagaagaagaacaacatcaaattgtatgtccgtcgtgtgttcatcatggacagctgtgatgacctgatacctgagtacctcaacttcatccgtggtgtggttgattccgaggacctgcctctgaacatctcccgagaaatgctccagcagagcaagatcctgaaagtcatccgcaaaaacattgtgaagaagtgccttgagctcttctctgagttggctgaagacaaagagaactacaagaaattttatgaggcattctctaagaatttaaagcttggaatccatgaggattccactaaccgtcgccgcctctctgagctccttcgctaccatacctctcagtctggagatgagatgacttccctgtcagagtatgtgtctcgcatgaaggagacacagaagtccatctactatatcactggtgagagcaaagagcaggtggccaactctgccttcgtggagcgtgtgcggaaacggggctttgaggtggtatacatgactgagcccattgatgagtactgcgtacagcagctcaaggagttcgatggcaagagcctggtctccgtgaccaaggagggcctggagctaccagaggatgaggaagagaagaaaaaaatggaggagagcaaggcaaggtttgagaatctctgcaagctcatgaaggagatcttggacaagaaggttgaaaaagtgactatctccaataggcttgtgtcttccccctgctgcattgtgaccagcacctacggctggacagccaacatggaacggattatgaaggcccaggcactgcgggacaactcgacaatgggctacatgatggccaagaaacacctagagatcaaccctgaccaccccattgtggagactctgcggcagaaggctgaggcagacaaaaacgacaaagctgtcaaagacctggtggtgctgctgtttgagactgctctgtcttctctcgcttctcactttaggaggcccaaaacccactccaaccgcatctaccgcatgattaaactaggcctgggcattgatgaagatgaggtcactgcagaagagcccagtgctgctgttcccgatgagatccccccactggagggtgatgaggatgcctctcgcatggaagaagtggattaaaggctcctgggaagcccccgccctctgtatagtatccctgtggctcccccaacagccttgactggccctgacccacctgggctctctctgctcatgtctacaagaatctcttctatcctgtccttgtgccttaaggcaggaagatcccctcccacagatagcagggttgggtgttgtgtattgtgtttttttgtttgttttattttgttctgaaattaaaagtatgcaaaataaagatgatgcagttttaaaaaaaaaaaaaaaaaaaaagg

SEQ ID NO: 1195 - DNA, 1892 bp, Rattus norvegicus
  Genbank Accession No. S61960
aaactgaccaaggagtatgatcaatcccgtccagcctccgagcctgcagccgtttggtcatggtgagctgcttcagctaacaattgcactgacagtgctcttgagccaagttgcttctgggcggaagtagtccatctagggctcggcctctttaaagaaacagacttctgcaaccttgggactacgtttggggtcgccggctattggacggagcagcgcaattgttagctgaagcagctcaccatgaccaaacggctgcaggctcggaggctggacgggattgatcaaaacctctgggtggagtttggcaaactgaccaaggagtatgacgtcgtgaacttgggtcagggcttccctgacttctcgcctccggactttgcaacgcaagcttttcagcaggctaccagtgggaacttcatgctcaaccagtacaccagggcatttggttacccaccactgacaaacgtcctggcaagtttctttggcaagctgctgggacaggagatggacccactcacgaatgtgctggtgacagtgggtgcctatggggccttgttcacacgctttcaggccctggtggatgaaggagatgaggtcatcatcatggaacctgcttttgactgttatgaacccatgacaatgatggctggaggttgccctgtgttcgtgactctgaagccgagccctgctcctaaggggaaactgggagccagcaatgattggcaactggatcctgcagaactggccagcaagttcacacctcgcaccaagatcctggtcctcaacacacccaacaaccctttaggaaaggtattctctaggatggagctggagctggtggctaatctgtgccagcagcacgatgtcgtgtgcatctctgatgaggtctaccagtggctggtctatgacgggcaccagcacgtcagcatcgccagcctccctggcatgtgggatcggaccctgaccatcggcagtgcaggcaaaagcttcagtgccactggctggaaggtgggctgggtcatgggtccagataacatcatgaagcacctgaggacagtgcaccagaattctatcttccactgccccacccaggcccaggctgcagtagcccagtgctttgagcgggagcagcaacactttggacaacccagcagctactttttgcagctgccacaggccatggagctgaaccgagaccacatgatccgtagcctgcagtcagtgggcctcaagctctggatctcccaggggagctacttcctcattgcagacatctcagacttcaagagcaagatgcctgacctgcccggagctgaggatgagccttatgacagacgctttgccaagtggatgatcaaaaacatgggcttggtgggcatccctgtctccacattcttcagtcggccccatcagaaggactttgaccactacatccgattctgttttgtcaaggacaaggccacactccaggccatggatgagagactgcgcaagtggaaagagctccaaccctgaggaggctgccctcagccccacctcgaacacaggcctcagctatgccttagcacagggatggcactggagggcccagctgtgtgactgcgcatgtttccagaaaagaggccatgtcttgggggttgaagccatcctttcccagtgtccatctggactattgggttgggggccagttctgggtctcagcctactcctctgtaggttgcctgtagggttttgattgtttctggcctctctgcctggggcaggaaagggtggaatatcaggcccggtaccaccttagccctgccgaggctctgtggcttctctacatcttctcctgtgacctcaggatgttgctactgttcctaataaagttttaagttattaggaccctc

SEQ ID NO: 1196 - DNA, 2012 bp, Rattus norvegicus
  Genbank Accession No. S63519
cggtcccacttgcctctaaatgcagacagtgagtacgtcacattaagtgaccaccacttcttagggactgccagtagcagggggaatgatacggccagttgaggcatttagcagtggaactgttctataagtgggtatttattttcgacaaggtaggccacactggcctcatctgctctgagtcttcctaatatagaaagtcatggaagttgtatgtagatgcctttgtgttaaatcttgcttcagaatcagagtgggatctctgggacacataccaagctcgtttgccttcattctgtattttgtttctttgataaaataatgattttcattttttgcttaatactacattcttaagctacatagactctctccgtgatacaacaggcagtgcatgctgttactagttcttttctcctagtaaggcctacacagttatttcttgttaagaagctgtgagatgtgacctccttcctgcttagcatcacacagaaaatctgatttcaagtatctcacttattcccaccgcatcactgtcagaacagcctctcagattcacccaaagaaatacaatcatgatgactcaaatggtgtataactcaggtccagtaattctgcataggtaatcagttaaaacagtttaaacatgaaattgattcaaatattgataatgttttactaatgtgagcaacagtgttatggaaaggattcatttgactcttgtggaatgggcctgtctaatttttcttaacataatcggtaaagtattactaagaaatgctccatcctgtttctgtccaagaaaggaaagcgatacctcctgctccctgaggtggcactagggatttaaccgggaccaggaccgcctgcacgctaggcaagcactctacaaatgagatatattcctagaccaacaaatccttttgttcttctaataatttgtttaaggagtttaatcttgaactccagatgcccgcatagtcttatctgggaagatattcgtttatttctcattttgtcacccatatctacttttttcttagaggttgatgtacagatatctaaaaatatgtattcctcaatgatcttatttaggagagtgtttttactgtcatatttaaaaatagattattttcatgctgccttctgttgattttggcaaattgtataatagatcgtcttgatcattgcattttttgtcttgtaaatgtatattttgtctttgtaaattcatttacttctcaggtgtgactttatggttgactttaaacgtatgaatgaatgaggatgtaaggaaagctgtcttatttattaacgtagatgcggtaaaagaagggtatttgggtttgagcttctttttatttgagtatagaaagttatgcttttaagtaaagaaatagcaagtacagaggaaataaaaataaatagaagaaagtaaaaaggaaaaaaaccctaagaaaatgaaacaaaaaaaaagatgtaagcgaaagcaagccacatgtgatggccaatgcctgtgaccagcacttgagagactaaggcaggaagaatactacaagcttgaggcatgtgtggtttcagagtgactttgaagcccgtctgggccatagagtaagaccaggttttgttctggagaacataaacaagagtatatgataattacagggaatagtctcatggatttacataaagacaacaagagggcttaagtggagatgtgtggtgctgaagtcttgcagattggaggcagggcctgacagagcatccaccattaccaaaatccttaggatctgggagcaacaccatagctgccaagggtctgatttaaatctgttctactcactggtcagcatattggactctgctactaatataatgttaaaatagcatacctggtaaaaataaaatacacgaagtgtgttgagtgtttgagatgaaagtaaaagaaaacctaaatcattgggcaacttgggaggaaaatcattttaaataaacaaatcacatcattaccg

SEQ ID NO: 1197 - DNA, 704 bp, Rattus norvegicus
  Genbank Accession No. S69874
cgccaccgcgtctccttgctgcttttgtgctctcccgctcgccatggccagccttaaggacctggaagggaagtggcgtctggtggaaagccacgggtttgaggactacatgaaggaactaggagtagggctggctcttaggaagatgggtgccatggccaaaccagactgcatcattaccctcgacggcaacaacctcaccgtcaaaactgagagcacggtgaagacgaccgtgttttcttgcaccttgggagagaagtttgatgaaaccacagctgatggcaggaaaactgagacggtctgcaccttcacagacggtgccctggtccagcaccagaagtgggaagggaaagaaagcacgataacgagaaaactgaaggacgggaagatggtcgtcgagtgcgtcatgaacaatgccatctgtactcgggtctatgagaaggtacaatgaggactggctaactcgtcatcctggacagcagtcagctggctgagggaataagctcaattcaatgagcaggtcgtacagaaccacactgcttcacttctttggttttatttttcatgacttttcatcatagacactttacccgaaacccatgtcagaccgttggtttacccaggatcattcctttggttagtaaataaatgcgtttgtgctaaaaaaaaaaaaaaaaaaaaaaaaaaaaaaaaaaaaaaaaaaa

SEQ ID NO: 1198 - DNA, 2986 bp, Rattus norvegicus
  Genbank Accession No. S70011
gtgctcctgggggcggcgcgcgggaccgtggcgcttccggcagcgggaggcggcacggagcgggaccgagaggcgcgggtggcggccggggaggcggatctgggacaatgtctggggaagtgccacccaacattaacatcaaggagcctcgatgggaccagagcacgttcattggccgagccagtcacttcttcacggttactgatcccaaaaacatccttttaacgaacgaacagctagagaatgcgaggaaagtggtacacgattacaggcaaggaatcgttcctgccggcctcacggaaaatgagttatggagagcgaagtacgcgtatgactcggccttccatcccgacacgggtgaaaagatgactctgataggaagaatgtcggctcaggtcccgatgaacatgaccatcacgggctgcatgatgaccttctaccggaccacaccggctgtgcttttctggcagtggataaaccagtccttcaatgccgtggtcaactacaccaatagaagtggtgacgctccccttactgtaaatgagctgggaacggcttatgtttctgcaacaaccggcgccgtggcgacagcccttggactcaatgccctaaccaagcatgtgtcgccgctgataggacgttttgttcccttcgctgctgtagctgctgctaactgcattaacatcccgctgatgagacaaagggaactcaaggttggtattcctgtcactgatgagaatggcacacgcttgggagaatcgaccaacgcagcaaagcaagccatcacgcaggtggtcatctccaggatcctcatggcggcccctggcatggccatccctccgtttatcatgaacaccttggagaagaaagcctttttgaagaggttcccgtggatgagcgcaccaattcaagtcacgctggttggcttttgtttggtgttcgccacccccctgtgctgtgctctgtttcctcagaagagttccatgtctgtgacaagcttggaggatgatttgcaagccagcatccaaaagagtcatcctgaattacggcgtgtgtactttaacaagggcctgtgaagccaagatcaagtgctggaggcacctcctgccatctgtgaacctcctgaagccaagcagtgaggaaatacgtgtgctgggcactccccgctacaaaagcctctgcaaaatctgtgttagagtcaagctgcctgtcaggagcctgacatttgaatcatgttgtaatttacaaaaaatacccttctggtagattttaatgatgccgttttttccaaagcccccaccttgagctttcaaaagctctggtgggcatagcatatatgctccagttacacactcagcaaacactggttatcaatcattggaaaggttaccagctcaactatcacattctgtttctacttctctccactgggtctcagcaatgaattggaaacacaaaggtctaagacaaatatccaaatttaaatactaaggaaactatatctccagtttggcaatggaccagtccaaagtagaacctcaattaaaaaaattgaggttcagagcataaacactccatacaccttcctgaagtcagccatagaccagggtaggatgccttccctgccatcctggattcttcaactcttcaatgtgtttagtgttcttaaaatattaattgtacctcacaggtactttatatcatgaatttccatcaaatacttaactgaaatggtctattcagtaccagtacaatgtgacattgactgggtgaccggtttttcagaagtgaaaccatagtccctatatgcctttttccccccatccttgtagaatttctttggctttcaggaagatatacagaaaccacacaaactagtccagcaactgtgcacattgtgctgcgttccaccctgtttgaagaccatgaagtcttgtggcatgtcaacatttctatggtgattttacatgtgacatattgggtgtagctgaggttgctttggaagtctgtggctattccacgtcatagacaagccacttgttacgctgagtgaaaaatcattgttaattcagatatttgtacgtggaaaaaaaccccacaaaaatagagactatctagtttctgtagattctttttcccaatgtttccagattgaatttcctcataaagaaaatatggtgtgccttgtgtctgtgcttctccttcctctgaaaggatggatggatctgaagcccccagccctcccccatgctgctagaatcttctgtggcgatgaccgccaaaccacctgaaatgcagtggctccctgtggcactctggcctcggacgagcctcactgccttcagtgcttctgttttaaacggtggtgagagcctggagctcaaggcagagtccacaggtgcttaaagaacactttcagaagaagctgaaggcctcgaggtctgttcatcaagccaatctcagagtccttgccccagtgcgtgtgtagctctgagaatgtgaagactcagttggaagatggtccaactcaccaagtgtcggcccagttagtgagaaacgcgcagtagacatggagctgggctcttttgaatttgttttgtgaagtgtcggcctcttactgcttttgtatagtgatactcactgtgtggtttaatcatgatttataaaaaaaaaagaagcaaatgaatgaaaattggcaatctttgctgatcttctaaaaatacttttttttcctgaagaaaaaagccacatgaagtgcaataatgttgtgcggtgacttgctgatagttctctgacgagagatagttatgtgtgtgtgactggctggcagatatcagtattagcgaggtctcttgccaatatcagagtcagtgtgtcatttcagtttaactggatgaactgtcaaataaatgcagaatgaaaataaacgactcttatttgtccgtgaaaaaaaaaaaaaaaaaaaaaaaaaaaaaaaaaaaaaaaa

SEQ ID NO: 1199 - DNA, 1747 bp, Rattus norvegicus
  Genbank Accession No. S76054
gcagctgctccgctcgctctcgaacctccgtcttcagctcactgccttcactccagacttcaccatgtccgtcagggtgactcagaaatcctacaagatgtccacctccggtccccgggccttcagcagccgctcgttcacgagtggacccggtgcccgcatcagctcttccagcttttcccgggtgggcagcagcagcagcagcttccgcggaagcctgggcggctttggcggggctggtgtcgggggcatcacggcggtcacggtgaaccagagcctgctgaaccccttgaagctggaggtggaccccaacatccaggctgtgcgcactcaggagaaagagcagatcaagaccctgaacaacaagttcgcctctttcattgacaaggtacgcttcctggagcagcagaacaagatgctggagaccaaatggagcttgctgcaacagcagaagacatccaggagcaacatggacaacatgtttgagagttacatcaacaacctccgtcggcagctggaagccctgggccaggagaagctgaagctggaggtggagcttggcaacatgcagggcctggtggaggacttcaagaataagtatgaggatgagatcaacaagcgtacagagatggagaatgagtttgtcctcatcaagaaggatgtggatgaagcctacatgaacaaggtggagcttgagtcccgcctggaaggactgaccgacgagatcaacttcctccggcagatccatgaagaggagatccgtgagctgcagtctcagatctcagacacgtctgtggtgctgtccatggacaacagccgctccctggacatggacagcatcattgctgaagttcgtgcccagtatgaggagatcgccaaccgcagccgagctgaggccgaaaccatgtaccagattaagtatgaggaattgcagaccctggctgggaagcacggggatgatctacgtcgctcgaagacggagatctctgagatgaaccgtaacatcagccgcctgcaggcggagattgacgccctcaaaggccagagggcaaccctggaggcggccattgctgatgcagagcagcgtggggaactggccgtgaaggatgccaatgccaagctggaggatctgaagaatgccctgcagaaggccaagcaggacatggcccggcagctgcgcgagtaccaggagctgatgaacgtgaagctggcgcttgacatcgagatcgccacctaccgcaagctgctggagggcgaggagagcaggctggagtctgggatgcagaacatgagcatccacacgaagaccaccagtggctacgcaggaggactgagttcatcctacgggggactcactagccccggcttcagctatggaatgagctctttccagcccggcttcggttctgttgggggatccagcacttatagccgcaccaaggctgtggtcgtgaagaagattgaaacccgagatgggaaactggtgtctgagtcttgtgacatcatgtccaagtgaatggccactgaagtcattgccagcctgaggtcctgcagctgctcaggggtcaaggggagacagctgtatggcagagtgcagggaactagggaccagccagagtaccagccctaaacctctggccaaccttgggaggaatttctatctgggatatgccaatgcccaactcaattgtattttccaaaataaagcctcagtggctgtaaaaaaaaaaaaaaaaaaaaaaaaaaa

SEQ ID NO: 1200 - DNA, 3001 bp, Rattus norvegicus
  Genbank Accession No. S78556
cggcacgagtgttcttgccctcgtagccctctgtccagccgccatgataagcgccagcagagccgcggccgcgcgtctcgtgggcaccacagcgtcccggagtcccgccgccgcccgtcaccaggatggctggaatggccttagtcatgaggcttttagatttgtttcaagaagggattatgcgtcagaagcaatcaagggtgcagttgttggaattgatttgggtactactaactcctgtgtggctgttatggagggcaaacaagccaaggtcctggagaacgccgaaggtgccagaactaccccttctgtggttgcctttacaccagatggggagcgacttgttggtatgccagcaaaacgacaagctgtcaccaatccaaacaataccttctatgctacaaagcgtcttattggacgacgatatgatgaccctgaagtacagaaagacactaagaatgttccctttaaaattgtccgtgcctccaatggtgatgcctgggtggaggctcatggaaaactctattctccgagtcagattggagcgtttgtgttgatgaagatgaaagagactgcagaaaattacttgggccatacagcaaaaaatgctgtgatcacagtccctgcttatttcaatgactcacagcgacaggccactaaggatgctggccagatatctgggctaaatgtgctccgagtgatcaacgagcctacagctgcagctctggcttacggtctggacaaatccgaagacaaagtcattgctgtatatgatttaggtggaggaacctttgacatttctatcctggaaattcagaaaggagtgtttgaggtgaaatccaccaatggggacactttcttaggaggtgaagactttgaccaagctttgttacggcacattgtcaaggagttcaagagggagacaggggttgatttgaccaaagacaacatggcgcttcagagggttcgggaagctgctgagaaggctaaatgtgagctctcctcatctgtacagactgacatcaacttgccataccttacaatggatgcttctggaccaaagcatttgaatatgaagttgactcgagctcagtttgaaggcattgtcacagatctaatcaagagaactattgctccgtgtcagaaagctatgcaggatgcagaagtcagcaagagtgacataggagaagtgatcctggttggtggcatgacgaggatgcccaaggttcagcagactgtgcaagatctttttggcagagccccaagtaaagctgttaatcctgatgaggctgtagccattggagctgccattcaaggaggtgtgttggctggtgatgttacagatgtgctactcttggatgtcactcccctctctctaggtattgagacacttggaggtgtctttaccaagcttattaataggaacaccactattccaaccaaaaagagccaggtattttctactgctgctgatggacaaactcaagtagagattaaagtgtgtcagggggaaagagagatggccggagacaacaaacttctaggacagttcactttgattggaattcccccagcccctcgtggagtgcctcagattgaagttacatttgacattgatgccaatgggattgtgcacgtttctgccaaagataaagggacaggacgtgagcaacagattgtaatccagtcttctggtggattaagcaaagatgatattgaaaacatggttaaaaatgcagagaagtacgctgaagaagaccggaggaagaaggaacgtgttgaagcagttaatatggctgaaggaattattcatgacacagaaaccaagatggaagaattcaaggaccagttgcctgctgacgagtgcaacaagctaaaggaagagatttccaaaatgagagaactccttgctcgaaaggacagtgaaacaggagaaaacattaggcaggcggcatcttcccttcagcaggcatcattgaaactctttgaaatggcatataaaaagatggcatctgaacgggaaggttctggaagttctagcactggggaacagaaggaagatcagaaggaagagaaacagtaatagtggcagtgcattgtggagctaggacgacatactatgaagcttgggagtaaaggaacttcctgagcagaaaaggggcaaacttcagtctttttactgtatttttgcagtattctatatataatttccttaatatataaatccagtgacaatatataaatccagtgacaatagctataactcatttaatggtaataaagtcagcaatagcaggttcacacttctataactagcctgctgttttcagctgcacgtaaaggggtgggatggggctgtgtaccaatcattattaggtaaatctggtttgtgctgaagtagctatgttttcgagatggaagcccatttcacatgcagtagaggtaatctgtcatggaccttgaattgaggttcatatgcagatgcttgttgaccaagagcactgctataaatgacctgtgtgtacatttgctccttcaactgatgccttgcaagactaagctctctgtgtcatggtctataggtacagaagttaggtcaatggataacagctgtgttagccatagcttaaagtgatctatcaagaattatacaagcctctcatgggcctaaggcatacttctccagctaccctcttgggtggccaatgtctgacatctatattcttgatgattgttcctttttcatccattctggattttttttttttttaataaaattctgaaagcctcttgatctcctttgtgaatggtagtagctcaaggactatgactgtaccatcaggtttgtgagtagaggtaaaaaatcaacactggctaaaaggttgaacaaattaaacatggtgagggactaaataacatgttggcatgtatgctggatgtggaagcccactcaggaagcagtgtgaagccaggcggggctacacaatgagacaccccgtct

SEQ ID NO: 1201 - DNA, 867 bp, Rattus norvegicus
  Genbank Accession No. S79213
tggtagtggtttccgcgacaggcaggtgcgactgctttagcccggcctgggctccacggctgcctggagggtctctgcagtgcccaccccttctcctccgggaccccacgccagcagcgaccctgagccagcagccggagcgaccggcaatggcggcctcgacggcctcgcaccggcccatcaagggaatcctgaagaacaagacctctacgacttcctcggtggtggcctcggccgaacagccccgccggaccgtcgaagaggagctgagtaaaaagtctcagaagtgggatgaaatgaacatcctggcaacatatcatccagctgacaaagactacggcttgatgaagatagacgagccagacactccataccacaatatgataggtgatgatgaagatgtctgtagtgattcagaaggcaatgaagtcatgactccagagatcttagcgaaaaagttagctgctgctgagggctccgagccaaagtttcggactcgggaacaagaaagcagtggagaggaagacaatgacctctcccctgaagagcgagaaaagaagcggcagtttgaaatgaaaaggaagcttcattacaacgaaggactgaatattaaattagccagacagttaatttcaaaagacctacatgatgatgacgaagatgaagaaatgtcagagactgcagatgcagacagcatgaatattgaagagtcaaatcaaggatctactgcaggcgaccatctgcagcacaaatcacaaagttcataaacgtgttcatcagtgcagtcgttgtcaaatacaaaccttgttacttataccacactgcttcttgttctctacgactcgtgactatgtaccaaaatacaca

SEQ ID NO: 1202 - DNA, 1742 bp, Rattus norvegicus
  Genbank Accession No. S82383
cggagacctgatttccagaagcagctgggtaggcaccatggccgggagcaccaccatcgaggcggtaaagcgcaagatccaggttctgcagcagcaggctgatgatgcggaggagagggccgagcgcctccagcgggaagtggagggagaaaggcgggcccgggagcaggctgaagctgaggtggcctccttgaaccgcaggatccagctggttgaagaggagctggaccgcgcccaggagccgcttgccactgctttgcagaagctggaggaagcggagaaggctgctgatgagagtgagagaggtatgaaggtgattgaaaaccgggctctaaaagatgaagaaaagatggagctccaggaaatccagctgaaggaagcaaagcacattgcagaagaggcagacaggaagtatgaagaggtggctcgtaagttggtgattattgaaggagacttggaacgcacggaggaacgcgccgagctggcagagtcccgttgccgagagatggatgagcagatcagactgatggaccagaacctgaagtgtctgagtgctgctgaagaaaagtactctcaaaaagaagacaagtatgaagaagaaataaagattcttactgataaactcaaggaggcggagacccgggctgagtttgctgaaagatcggtagccaaactggaaaagaccattgatgacttggaagataagctgaagtgcaccaaagaggagcatctctgtacacaaaggatgctggaccagaccctgctggacctgaacgagatgtagaccttccccatccctgccctgccctgctggccgctcctccctctgaccttgactccgcctgaggccagcctccctgaagctggcttgaaactgagggctgatctttttaactgaaggctgctttccctcctgccacccctcttacccctcttgtctttttcacaaaactgtgtcagcctcttcccagagttccagctggagggctgaacacctttgggaacaatatttaagggaatgtgagcacagcgcaaagtgtcctcaatgcagttgtgatatgcacattgtgattactttttgtcttagcaaccattttaacattccaagcacttgtcaggcttggagcagcacatcttagcctaatggataccgtctctccatggaggagaaacacaggaatgggcctgccttactgagagccagcagagcccaggcagactccactgtgggagacctcagtgctctgtaccaagtcttagccaaacaacagggattctaggaagttagccaaaaacaaaaaccattccggtctgtgaaggttttcagctttgatatctttgaacaactttacacttatttttagttttgactttttccgtccgatgtgaccaaataggagagtgagacatctgagacgcccccgcctcccagggccttgtgcatgttaggccagcgtgctaccgttcacccccagccctgagcccgaacttgtctcagctctacccctttcccaactgctcagaaatggatcatgatgccccttagtgttgtggtgacctcttagtgttcacctgcccccaagggagacggaaaaggaaattatgtttgtgcccactgatttagccacatgaaagtcatctcattgctctttcctgaagctgctgtctctaaagtgccatctctttgtgctttgtatcagtcagtgctggagaaatcttgaatagcttatgtttaaaaaaaa

SEQ ID NO: 1203 - DNA, 185 bp, Rattus norvegicus
  Genbank Accession No. S82579
aataaaatatgtgtcatccattctttttgagtaaggtgatatttattgattctctgttgacaaaacctaaatatttctctacttgtacagagtgttaatcttctcactttcttctacagtagtttctatcatatgttttattaatagcatcagaaaatcatgggctggtgggatggttcttccaa

SEQ ID NO: 1204 - DNA, 811 bp, Rattus norvegicus
  Genbank Accession No. U00926
ggaattccgctgctgtcgctaagctaaagtcactgacgtttccgccaccatgctgcccgccgcattgcttcgtcacccaggtctgcgccgtctggtgctccaggcgcgtacgtacgcccaggccgccgcctcacctgcccccgccgctgggcctggacagatgtccttcaccttcgcctccccgacgcaggtgttctttgatggtgccaatgtccggcaagtggatgtgcctacgctgactggagcctttggcatcctggcatcccatgtccccacactacaggtcctacggcctgggctggtaatggttcatgcggaagatggcaccacaactaagtattttgtgagcagcggctccgtcactgtgaatgcggactcctctgtgcaattactagctgaagaagtcgtgacactggacatgctggacctcggggcagcccgggcaaacctggagaaggcgcagtcagagctgtcaggggcagcagatgaggcagcacgggctgagatccaaatccggatcgaggccaatgaagccctggtgaaggccctggagtaggcgtactttgtctgtcacccacagggtaacagaggcaggtcctggggggctgaagtcgccaccagggggcagcagtgctccggttactggcttaaagcttccctggtgctgcctgccaggtcatggagggcttccccaggcttccagagtctgggatccccaggatgcctctggagagctggccttgattgcccctcaaagccacccggacagtcagctggcccagcctatctgcattaaataccacggaattcc

SEQ ID NO: 1205 - DNA, 3378 bp, Rattus norvegicus
  Genbank Accession No. U01914
atggagcaaagctacggaggttatggggcatggagtgctggacctgccaacacccagggtacatatggaagtggtgtggccagctggcaaggttatgaaaactacagctactacaatgcccagaacaccagtgtccctacaggaacaccctatagttatggcccagcctcgtgggaggccaccaaggccagtgatggtggcctggcagctgggagttctgctatgcatgtggcctcttttgccccagagccatgcaccgacaactctgactcgctcattgccaagatcaatcaacgtttggacatgttgtccaaggaaggaggcaggggtgggatcagcagcggtggggagggcatgcaggaccgagacagctccttccgcttccagccatatgagtcctacgactccaggccctgtatgcctgagcatactccctaccgccccagctacagttacgattatgactttgacttgggaactgaccgcaatggtagttttggcgggacattcaacgactgtcgggacccaaccccagagcgaggcgcccttgatggtttcttaaggggccggggccagggccgcttccaggaccggagcaactcgagcaccttcatacgtagtgaccccttcatgccaccctcagcctcctcagagcccttatccaccacctggagtgagctgaactacatgggtggacgtggtctaggtgggccctccaccaacaggccgcctccttccctcttctcccagtccatggcccctgactacagcatgatgggcatgcagggggtgggcggttttggtggcaccatgccttatggatgtggccggtcccagactcggatacgggattggcccagaaggagggggtttgaacgctttggaccagacaacatgggcaggaagcggaagccgtttccattgtatgaagaacctgatgccaagctggcccgtgctgacagtgaaggagacctctctgaaaacgatgatggagctggtgacttacggtcaggagatgaagaatttaggggggaggacgacctctgtgactcccggaagcagagaggagaaaaggaggacgaggatgaggatgtgaagaagagacgggagaagcaaaggaggagagatcggatgcgggaccgagcagctgacaggattcagtttgcctgttctgtgtgcaaatttcgtagctttgaagatgaagaaatccaaaagcatctgcaaagtaaatttcataaagagaccttgcggtttataagtaccaaactacctgacaagacagtagaatttctccaggagtatatcataaacaggaataagaaaattgagaaacggcgtcaggagttgttggagaaggaaagccctaaacccaaaccagatccattcaaagggattggccaggagcatttcttcaaaaggattgaagccgcacactgcctggcctgtgacatgctgattcctgcacagcaccagctcctgcagcggcatctgcactctgtggaccataaccataatcgaaggttggctgctgaacaattcaagaaaacaagtctccatgtggctaagagtgttctgaacaacaagcatatagtgaagatgttagaaaaatacctcaagggcgaggatccttttgtcaatgaaactgctgatcttgagacagaaggagatgagaacttaggagaggagaaggagacaccagaggaggtagctgcggaagtcttagcagaggtgatcacagcagcggtgaaggctgtagagggggatggagaaccagctgcagagcatagtgacgtcctagctgaagtggaagggcctgtggacaccgccgaggctggtagtgactcccacactggaaagctgctagaagaacagacctgtgaaacagcatctgaaaccaggaacatggaagacatggccagaggtgaggctgctgaggccagaaatgaagcagctgtgccagcagcagccgccggaagcccagtacctgtcatagccatcccaggaatcctggaagatgagctggaacaaactgatgcagaggccaaagatactcccacagaataatgatcttctcttccctgtttcaagggacgtgttatatcatgtgttctttgttttataagctgtactggggtgtgtgttattcggtggaaagactgggccatttccttcccagtgtacctcaaggattgatgctatacagtagatggcttcccacctctgttagaaatacaaaaagaggtaaaccattttcccaagtggcctttgatggctatctgtgcactgcagctagaatagtaagagtagatcttcctgacacttgttgagtcctgaattggacagaatgtgaggatttttgttttgttttgtgttgtgtttttgtttggtcttcgtttcactttattttgctttttctcttgggaagcaatctgatacgaacatagcttacttgagaaaaaaattatttaggggaattcccttattcacctctgcatggttgatgtgggacatacacagttcaaccatccatgtgtgcaagagctgagattgtgccctccaccaataaacagtcttgtttcaataaacatcaggccatttcctaactgtcggcattgaaatagcatcttgcttggaccaagctagctttagaactcaatcctactgtttagcctctgcagtgctggtgccatgagtgtacggccatgctcagtggggctttggttttgcaatacactgtatcctatgttcctctccagctgtggcagcattagacagatgacatggcagtgacttggctgtgtttgagatggtccctcaggcttccactggaaggacccgcacctgagcctgtagatcgaagacactgctaaggccttggttctcactgttcagtgcttgctaatcagttggtgttcgtctcccacctctattagtggatgttttgttgtttgctctctttccttttgttatttccacctaaaggtatttagaaaaccatggaattactccattgatgaaaaacaaatgtggacttcatagttgggatctgtctgtcaaaagctcaaaccgttaagtaaaagtgtttgactaaagcaagtagtagtccgagcaaggagctagcatgtctctaaagcagcatgtgctaaggttttacaggctcagaatgatgggtctcccccgttttgaagttacaatgctgtgtccatttgtacacagctcacatcttggaaacatgagccagtgagggactacggaagagatggtagaccatcacagcaatttcatcagcacgtctgtctgttaaggagcattactggggatgtgatagggactttggaatatcattgtcaaaacaagcaataaattgatgccacggag

SEQ ID NO: 1206 - DNA, 1612 bp, Rattus norvegicus
  Genbank Accession No. U05675
aggcaaagggcaactgcttggaatttcagaaaatctgaaaccatgaggcatctatggctgctgctcctgtctgtttccttagttcaaactcaagctgcaactactgactccgataaagtggacctctcgattgcccgtggtcatcgacctgttgacaggagaaaggaagagcctcctagcctaagacctgcccctcctcctatcagcggaggtggctatcgagcccgtccagccaaagttgatgcaggtcagaagaaagtggaacgaaaaccccctgatgcaggaggctgtgttcacggtgacggagacatgggagtgctatgtgctacagggtgtgagttgcgtcaaactttgctaaaccacgaaaggccaatcaaaaacagtattgctgagttaaatagcaacataaactctgtttatgagacctcttcggtcacctttcagtacctgactctgctgaaagacatgtggaaaaagaagcaggcacaagttaaagataatgaaaatgtcataaatgagtattcctccattttggaagaccagaaattatatattgatgagactgtgaacgataatatcccccttaatcttcgtgtgctccgctcaatcctggaggacctgagaagcaaaatgcaaaaattggagtctgacatctcagctcagacggaatactgccacactccatgcaccgtcaactgcaacatcccggtggtgtctgggaaagagtgtgaagagatcattcggaagggaggtgagacatccgaaatgtatctcattcagcctgacacctccagcaaaccatacagagtgtactgcgacatgaagaccgaaaacggaggatggacggtcatacagaaccgtcaggatggcagcgtcgactttggcaggaaatgggacccatacaaaaaaggatttggaaatattgcaaccaacgaagatacgaagaagtactgtggcttgccaggcgaatattggcttggcaatgataagattagccagctcaccaggataggacccacagaactcctaatcgaaatggaggactggaaaggagacaaggtgaaggcacactatggaggcttcacggtgcagaccgaggccaacaagtaccaagtgtcagtgaacaagtacaaagggactgctggcaacgccctcatggaaggggcctctcagctggtgggggagaacagaaccatgaccatccacaacggcatgttcttcagcacctacgacagggacaacgatggctgggtaactacagatccaagaaagcagtgctcaaaagaagatggcggcggctggtggtataacagatgccatgcagccaatccgaatggcagatactactggggtggcctttacagctgggacatgtccaagcacggcacagatgatggtgtggtgtggatgaactggaagggatcgtggtactccatgagaaggatgtctatgaagatcaggcccgtcttcccacagcaatagtcccccaagcatagactttcagccttctatgtctgacattttttacattatgttattggaattttctttgatacattatatccactaatgctcaaaacaatggctgagtgtgtctttttttttttttttt

SEQ ID NO: 1207 - DNA, 1133 bp, Rattus norvegicus
  Genbank Accession No. U17035
cctcggctgagctgcattccaatcccagctacatccggagcccagctacattcgagcccagccacatcccgagccaaccttccagaagcaccatgaacccaagtgctgctgtcgttctctgcctcgtgctgctgagtctgagtgggactcaagggatccctctcgcaagaacggtgcgctgcacctgcatcgacttccatgaacagacgctgagacccagggccataggaaaacttgaaatcattcctgcaagtctatcctgtccgcatgttgagatcattgccacaatgaagaagaacaatgagaagaggtgtctgaatccggaatctgaggccatcaagagcttattgaaagcggtgagccaaagaaggtcaaaaagagctccgtaactagagagaagccactcgccacagtgctgagaccgatggacagcagagagacggtctctccacctccctttacccagtgtgcggctagtcctaactgtccctgtttctcctgaccatggtcccatcagctggtactcccactacagcgtgatggacaaggcctggtcctgagacaaaagtaactccagcagcaaggcttcccaattctctaagagctggtccgaatcttccctcaggcagctatgacggctctcctagctctgttccgtaagctatgtgcaggtactaatctcttcagcatgtgccatgccccagcctgctccacacaccctccttctccctagctctaagctcatcagttctgagttcacctgagctcctttatttcaaatgcagtccaggtgagatggcaaatcaagtttgtcagaacaaacttaccaccaccttcccaagggaatttcataactcagaatactcacaggaacctagacatgcatgtttaaatattatttaatgaccgactgtacaaagtggaactcctagatgtattttttgtacgattttcattgtatatgtaagaacttgtgtggttaagtatgtatcaatgggtagttaaagtttacataggcaaatgctttgaatgctacatattacaagatgtgttggatggttttcaaaataaaatgtactgtattgaatgtagtatgagacaaaaaagtaataaagtaataataactgacatga

SEQ ID NO: 1208 - DNA, 1812 bp, Rattus norvegicus
  Genbank Accession No. U17565
ctcagagatgaggagcagacagctgagagcattaagaaccaaatgacggtgaaggaatgggaaaaggtgtttgaaatgagtcaggaccaaaacctgtaccacaatctctgcactagcctcttccctacgatccacggcaatgatgaagtaaaacgtggcgtcttgctgatgctgttcggtggcgttcccaagacaacaggggaaggaacctctcttcgtggggatataaatgtttgcattgttggggatccaagtacagctaagagccagtttctcaagcatgtggatgagttcagtcccagagctgtgtataccagtggcaaggcctccagtgcttccggcttgacagcagctgtggtgagagatgaggaatctcacgagtttgtcatcgaggctggagcgttgatgctggctgataacggtgtctgttgcattgatgagtttgataagatggacatgcgggaccaagttgctattcacgaagctatggagcagcagaccatatctatcactaaagccggagtgaaggcaactctgaatgccaggacatccattttagctgcagcaaaccctgtcagcggacactacgacaggtcaaaatctctgaaacagaacatcaatctgtcagcgcccatcatgtcccgctttgacctcttcttcattttggtggatgagtgcaatgaggtgacagattatgctattgccaggcgcatagtagacttgcattcgaggatcgaagaatcgatagaccgggtttattcccttgatgatataagaaggtatcttctcttcgcccgacagtttaagcccaagatttccaaagagtcagaggacttcattgtggagcagtacaaacgcctccgccagagggatggctctgggatcaccaagtcgtcgtggagaatcactgtgagacagcttgagagcatgatccgactctcagaatcgatggcccgcatgcactgctgtgatgaggtccagcctaaacatgtgaaggaagcttttcgattactgaataaatcgatcatccgtgtagaaacgcctgacgtcaatctagatcaagaggaagagatccagatggagacggatgagggaccaggaggcatcaatggtcatgctgacagccctgcccctgtgaacgggttcaatggctctggtgaagatgccagtcaggagaccgttcccaagccctcccttaggttggcctttgctgaatactgccgaatctctaacctcatcgtgcttcacctcaggaaaatggaagaagaggaggatgagtcagccctaaagaggagcgagctggtcaactggtacctgaaggaaatcgagtcggaaatcgactctgaagaagagctcataaataagaagaggatcatagagaaggttgttcatcgtctcacacactacgatcacgttctgattgagctcacccaggctggactgaaaggctccagtgaaggaagcgagagctatgaggaagatccttacctggtagtcaacccgaactacttgcttgaagattgagatatagaaggtgacttacggccaggaaccgggggtggcctaccttagccgggacctgggcatgcactgagaccgtttctggagcgatgcttgggggacagttgagaagagacagctgaacagtgagtaatgccgtgatttcatgctggacatgcgtgggtactttgtgcttttcctacacatgaaataaaaagtatttcagaaaacatgattgggatccaacttcaacaggacaagacaaagtgcccacgcatgtgccagcattaaatccacggccatgaactcagc

SEQ ID NO: 1209 - DNA, 6152 bp, Rattus norvegicus
  Genbank Accession No. U17837
gccaagatggcggcggcgcggccgcgggcgccagggcgacggcggcggctgaggctctgggctcgctgaagcgttggcacgtcgcgctctgggctcatgtaatcaaagaagtttctttgttgtgtgtatcttcacagaacacaacaggaattgaaaatgcatcagaacactgagtctgtggcagccactgagactctggctgaggtacctgaacatgtgcttcgaggacttccagaggaagtaagacttttcccatctgcagtcgacaagactcggattggtgtctgggctactaaaccaattttaaaagggaaaaagtttgggccatttgttggtgataagaagaagagatcccaggttaggaataatgtgtacatgtgggaggtctactacccaaatttggggtggatgtgcattgatgccaccgatccggagaagggcaactggctacgctatgtgaactgggcttgctcaggagaagagcagaatttatttccactggaaatcaacagagccatttactataaaaccttaaagccaatcgcgcctggcgaggagctcctggtctggtacaatggggaagacaaccctgagatagcagctgcgattgaggaagagcgagccagcgcccggagcaagcggagctccccgaagagccgcagagggaagaagaaatcacacgagaacaaaaacaaaggcatcagaacccaccccacacagctgaaggcaagtgagctggactctacctttgcaaacatgaggggctctgcagaaggtccaaaagaagaggatgagaggcctttggcttcggcacctgagcagccagcccctctgccggaggtggggaaccaagatgcagttccacaggtggccatccctctccctgcctgcgagccacagccagaggtagatgggaaacaagaagtcacagactgtgaggtcaatgatgtggaggaagaggagctggaagaggaagaggagctggaagaggaggaggaggaggagttgggagaagatggggtagaagaagcagacatgccgaatgaaagctctgcgaaagagccggagatccggtgtgaagaaaagccagaagacttattagaagagccacagagcatgtcgaatgaagctcgtgaagactctccagacgtgacccctcctccccacactcccagagctagagaggaggccaacggtgatgtacttgagacatttatgtttccgtgtcagcactgtgaaagaaaatttgcaacgaagcaggggctagagcgtcacatgcacatccacatttctaccatcaatcatgctttcaagtgcaagtactgtgggaaacggtttggcacacagattaacaggaggcggcatgaacggcgccacgaaacggggttgaagagaagacccagcatgactttacagtcctcagaggatccagatgatggcaagggggaaaatgttacttctaaagatgagtcaagtccacctcaactcgggcaagactgtttgatattgaactcagagaaaacctcacaggaagtactgaattcatcttttgtggaagaaaatggtgaagttaaagaacttcatccgtgcaaatactgcaaaaaggtatttggaactcacaccaatatgagacgacatcagcgtagagttcatgagcgccacctgattcccaaaggtgtcaggcgaaaaggaggacttctggaagagccacagccaccagcagagcaggctccaccctcccagaatgtctatgtcccaagcacagagccagaggaggaaggggaaacagatgacgtgtacatcatggacatttctagcaacatctctgaaaacctaaattactatattgacggtaagattcagaccaacagcagcactagtaactgtgatgtgattgagatggagtctaattctgcacacttgtatggcatagactgtctgctcactccagtgaccgtggagattactcagaacataaagagcactcaggtctctgtgacagatgatcttctcaaagactctcccagcagcacaaattgtgagtctaagaaacggaggactgccagtccacctgtgctccccaaaattaaaacggagacggagtctgattccacagcaccctcgtgttccttaagtctgcccctgagcatatccacagccgaggtggtgtccttccataaagagaagggcgtctatttgtcgtccaagctcaagcagcttcttcagacccaggacaagctgacccttcctgcagggttttcagcagctgagattcctaagttaggtcccgtgtgcgcgtctgctcctgcatccatgttgcccgtgacctctagtaggtttaagagacgcaccagctctccaccgagctctccacagcacagccctgcccttcgagacttcgggaaaccaaatgatgggaaagcagcatggacagacacagtcctgacttccaagaaacccaagttagaaagtcgtagtgactcaccagcatggagtttgtctgggagagatgaaagagaaaccggaagccctccttgctttgatgaatacaaaatatcaaaggaatgggcagccagttctactttcagcagtgtgtgcaaccaacagccattggatttatccagcggggtcaaacagaagtcagagggcacaggcaagactccagtcccatgggaatctgtattggatctcagtgtgcataaaaagccttgcgattctgaaggcaaggaattcaaagagaaccatttggcacagccagctgcaaagaagaaaaaaccaaccacctgtatgcttcaaaaggttcttctcaatgagtataatggtgttagcttacctacagaaaccacaccagaggtgaccaggagcccaagtccttgtaaatccccagatacacagccagatcctgaacttggtcctgactcaagttgctcagtccccactgctgagtctccacctgaagttgttggcccttcctcaccccctctccagacagcctccttatcctccggtcagctgcctcctctcttaacccccacagagccttcttcccctcccccctgccctcctgtgttaactgttgccactccaccacctcccctccttccaaccgtccctctctcccacccctcttctgatgcctcccctcagcagtgtccctctccgttctcaaacaccactgctcagtctcctcttcccattctctccccaacagtgtctccctctccctctcccattcctcctgtagagccacttatgtctgctgcttcccctggtcccccaacactttcttcctcctcctcttcttcctcttccttcccttcctcttcctgctcctccacctccccctccccaccccctctttcagcagtgtcatctgtggtttcctctggggacaacctggaggcatctctgcctgcagtaactttcaaacaggaggagtcagagagtgaaggtctgaaacccaaggaagaggccccacctgcagggggacagagtgtggtccaagaaacattcagcaaaaacttcatttgcaatgtctgtgaatcgccttttctttccattaaagacctaaccaaacatttatccgtccatgctgaagagtggcccttcaaatgtgagttttgtgtgcagctgtttaaggttaagactgatctatcagagcatcgatttctgcttcatggggttggaaatatctttgtgtgttctgtatgtaagaaagaatttgccttcttatgcaatctgcagcagcaccagcgtgatctccacccagatgaggtatgcacacaccacgagtttgaaagtgggaccctgaggccccagaacttcacagaccccagcaaggccaatgttgagcatatgccaagtttgccagaagagcctttagaaacttctagagaggaggagttaaatgattcctctgaagagctttacacgaccatcaaaataatggcttctggaataaagacgaaggatccagatgttcgacttggtctcaaccagcactacccgagctttaaacctcctccatttcagtaccaccatcgaaaccctatggggataggggtgacagccaccaacttcaccacccacaatattccacagactttcactactgccatccgctgcacaaagtgtgggaagggcgtcgacaatatgcctgagctgcataagcatatcttggcgtgtgcgtctgcaagtgacaagaagaggtacacccctaagaaaaacccagtgcccctgaaacaaactgtgcagcccaaaaatggagtggtggttctagacaactctgggaaaaatgccttcagacggatggggcagcccaagagactgagcttcaatgttgaactgggtaaaatgtctccaaacaagctcaagctgagtgcgctgaagaagaaaaaccagctggtgcagaaggccatccttcagaagaacagagccgcgaagcagaaggcggacctgagggatacttccgaggcgtcctcacacatctgcccgtactgtgacagggagttcacatacattggcagcctgaataagcatgccgccttcagctgtcctaaaaaacctctttctccttccaaaagaaaagtttcccattcgtctaagaaaggtggccatgcatcatcttctagcagtgacagaaacagcagctgccacccccggaggcggactgcagataccgagatcaagatgcagagcacgcaggcacccttgggcaagaccagagctcggagtacaggccccgcccaggcctcactgccctcctcgtccttcagatccagacagaatgtcaaatttgcagcttcagtgaaatccaaaaaagcaagctcttcatccttgaggaattccagtcccataagaatggccaaaattactcacgtcgagggcaaaaaacccaaagctgttgccaagagtcattctgctcagctctcaagcaaatcctcccgaggcctgcatgtcagagtgcagaagagcaaagctgtcatacagagcaagactgccctggccagtaagaggagaacagaccggttcatagtgaaatctagagagcgcagcgggggcccaatcacccgaagccttcagctggcagctgctgcggacctgagtgaaagcaggagagaggacagcagtgccaggcatgagctgaaggacttcagctacagtctccgcctggcatctcgatgcggctcatcaacagcctcttacatcaccagacaatgcagaaaggtcaaggccgccgcagcaactccgttccagggacccttcctcaaagagtaggcactctgtctgctccttaacagcacctgaagtgacctggaatcagtgaagccaaagggaccagcagtctgccctgcagagagcactgacctctcccagttgtgagagtgagagaacgagagagagagagagagagagagagagagagagagagagagagaatgagaatgtgtgtgtgtgtgtgctggtgcatgtgtgtggtcttcaagccaaggtcccagcctcaggagcaggaccttcccatttcccgtcatcctctggatgatccttggacgtggcccagaaccgtgctctgtggtgcagccatcctgcccgggaggggcatctccttctatgcaatttttttaaagagttccttggccctgctttgtgcttcttgagctgtccgtttgccaccactgggacttggatctggccctgaggggtggggaagagggcctatctaaggataacctttcagaggtcaagctccccttcatgccacccctcccccctgccctcaccgaccttttccccacactgtctctgggaatcaatagcagatagcatatagatccatcagggttgagcctgaacctcggccctagcactaggaaatcccccttttctccctaagcaactggagccgccagctttcaagtcatttcctcctttgaggttctagagtccgagagtctgctccgaagtctctcctgggaacccgggagccctcgcacccaggacgcagactctgtgcccattcttagacctgaggtagaagaagcagtgttttgggacgatagggtggaggcgtgcctactttgtctcctctggtgggacctcctacatcattggcatctgaaccttgcaagttcgctgcaaagagaagcaaagga

SEQ ID NO: 1210 - DNA, 5543 bp, Rattus norvegicus
  Genbank Accession No. U17971
cgggcgagcgctagcggccgcggcggccgcgcggaacccagggaggcgggacgcagagccggagcgcggccccgaccaggcgggagcccgagcagcgctggcgtggatgctccccatcgcttggtcgttggagactcggttgctttttaatggcagcagcggctgttggatgactagagtttgttttgactggagggtcgcttttgcttggcactataactgctggattggtccttcctggcccttccactgttgaagggagaagatgccactgccatttgggttgaaattgaaacgcacccggcgctacactgtgtccagcaagagctgcctggttgcacggatccagctgctcaataatgagtttgtggagttcactctgtccgtggagagcactggccaggagagcctagaagctgtggcccaacgcctggagctgagagagatcacgtacttcagcctctggtactacaacaagcagaatcagcgtcgctgggtggatttggagaaacccctgaagaagcagctggacaagcacgcgctggagcccaccgtctactttggagtggtgttttatgtgccctctgtttcccagctgcagcaggagatcaccaggtaccagtattacctgcagctgaagaaggatgttctggaaggaaaccttccctgcacattggagcaagccattcagctggctggcttagctgttcaagctgattttggcgactttgatcagtatgaatcccaagattttcttcagaaattcgccttgctccctgtggggtggctacaggatgaaaaactgctggaagaagcagcccaaaaagtggccttgctgcatcagaaatacagagggctcacagctcctgaggccgagatgctgtacatgcaggaggtagagcggatggacggctatggagaggagagctaccctgccaaggacagccaaggaagtgacatatccattggtgcttgtctcgatggcatctttgtgaagcacaagaatgggaggcctcccgtggtgttcaggtggcacgacattgctaacatgtcacacaataagtccttttttgcgttagaactggcaaataaagaggagaccatccagtttcaaactgaagacatggaaacagcaaagtacgtgtggaggctgtgtgtggcacgccacaaattttacagactgaaccagtgtaacctgcaaactcaggctgccacgttgaactccgtcaggaggggctcatcgtccaggatgtctctgcctaaaccccagccctatgcgatgcctcccccaccccagctgcattataatggacattatacagagccatttgcttcttcccaagacaatgtctttgtgcccaacaagaatggattctattgccactcccagacaagtttggacagaacccaaattgacctcagtggccgcatccgcaacggcagcgtgtacagtgcacacagtacgaactccttaaacacacctcagccctacctgcagccctcccctatgtcctccaaccccagtattccaggcagcgatgtcatgagacctgactacatcccatcccaccggcacagcgccttgattcccccatcctaccgcccgacccctgactacgagagcgtgatgaagcggctcaacagaggcatggtgcatgcagacaggcatagccactcgctcaggaacctcaacattggcagttcctatgcatacagcaggcccgacgccttggtctacagccagcctgagattcgggaacacccacacctcgcctctccccagtcagcccactacccatttaacttgaactacagtttccacagccaggctccgtatccataccctgtggagaggcggcctgtggtgggcgctgtgagtgtccctgagctgaccaatgtgcagctgcaggcccaggactacccagctccaaacattatgaggacccaggtgtaccggccgcccccgccatatccttacccaagacctgccaacagcaccccggacctatcgcggcacctctacatcagcagcagcaatccagatctcatcaccagacgcgtccatcactcggtgcagaccttccaggaggacagcttgcccgtggctcactctctgcaggaggtgagtgagcccctcacagcagctcggcatgcacacctacagaagaggaacagtattgaaatcgcagggctcacacatggtttcgaaggcctgaggctcaaggaggagacgatgtcagcctcagccgcagacgtggctcccaggaccttctcagcaggctcccagtccagcgtcttctctgacaaagtgaagcaggagggaaccgaagagcaggggagtggtgggtacagtcacaagaagtccctttctgatgccaccatgctgattcacagcagcgaggaggatgaggacttagaagacgacagcagcagagaacacgctgtgtctgagccccgccttacggctgctttctctcaggaacaacagctaaactacccctgtgcttcagtgactccggtcactggccctctgcatattttcgagcccaagtcccatgttacggagcctgagaagagggcaaaggacatcagccctgtccacctggttatggagactcatcagccccgaagacatggactgctgaccccctccatgtccgagtcagacctcacgacgtcagggaggtaccgagctaggagggactctctcaagaagaggccagtgtcagatctcctctctgggaagaagaacactgtggaaggacttccgccactagggggaatgaaaaagactcgagcagatgcaaaaaaaattggccccctcaagctggcagccctcaatggactctccctgtcccggctgcccctgcctgacgaaggcaaagaagtgtccaccagagcgacaaatgacgagaggtgtaaagttctggagcagcggttagagcaaggaacggtcttcaccgagtatgagaggattctgaaaaagcggctggttgatggcgagtgctcaacagctcggctccctgaaaatgcagagagaaaccgattccaagatgtgctcccctacgatgatgccagagtggagttggtgccaaccaaggagaacaacactggctatatcaatgcgtcacacattaaggtctctgtcagcggaattgaatgggattatattgccacacagggaccattacaaaatacctgccaggacttttggcagatggtgtgggaacagggagtcgcaattatagcaatggtgacagcggaagaggagggaggtcgggagaagagctttaggtattggccacggcttggctccaggcacaacactgtcacctatggaaggtttaagatcacaactcgcttccgcacggactcgggctgctacgccaccacaggtttgaagatgaagcaccttctcacagggcaggagaggacagtttggcatctccagtacacagactggcctgaacatggctgtcccgaagacctcaagggatttttatcataccttgaagagatccagtcagttcgacgtcatacaaacagtacaagtgaacccagaagtcccaaccccccgctgctggtgcactgcagtgctggcgtgggaagaactggggttgtcattctgtcagagatcatggtggcctgtctggaacacaatgaggtgctggacatccccagagtgctggagctgctgaggcagcagaggatgatgctggtgcagacacttagccagtacacgttcgtgtaccgggtgctcattcagttcctgaagagctctaggctcatctaagctccaccacctttctatggggacccaatcatgtgatgtgtttacagctttaaaaagaaaaaggaaagaaaagagtgcagctcccactttgttcccaggagtccatgtggagacctcaacaggaagtgtgtaagagctgaagaagctaagcatggggctgaggagtctggggacctgggagaggccgaggaggcaggtgctgccctggccacatctgcctggtttgctgcacttgcacaagttttggagattgtattttctagacagttctctgtcgtactgaagctgcctgggcagtcccagccagcacttaaggcacacagacttctatcttaaactcatatttgataatgcaattttatgactaaatagggttttttcttttttagctagaagctgaacttttctgtgggacatccacagaccgtgtggttcttgagtacctgtatttaaaaccattattagcttttgtttaagaacaaaaaccatgggggaactaagtgttttattcatgaaatccaaaactaaagaaaatctaaaagtgttattttgaaacatagaaagcatttttatattcagaatgtttttttaaaagttatatatttgtaccttctatattttccaaataagagctccattgttatgacactgagtcaatgtaaagttggggataaaggcacattatttaaaaatctaagaatcagattcactattttttcagtattattagtaagcgtaaaatgagtttgatttttttgaacatgaaagagcaattgcataggatggttttaagcacttttttgttaaaaatgagtttaatatatgtggctttatatttaagcaacagtggacactatttcaaagagaagggctctgagtacgttcgatgactaggggaagaggaagtgctctcggggctcacccggaaggtgtggtcattacacaaatgcagtattacctatgctcactcgagcgagagcgagagctgagatggcgtggaactcaaggcctgctaccgtgatgacgggctttgctgcctggggttcttcctgtctttcttccccccacagacaagtccaggcttacattaccattagagacccccgaagaggctttgtttcctttaggttgaaaggaggaaatagttaacgaggttcctttccctgaaccacagcccaaacttgtggggccaccagaaattgctgtggtgttcagggggtacttgaatttagcaccgtaatcctgtcctcccccagggtcagttctaggtactggtctccctttccatcccatttgggcacattctctattgatcagaacccaggcttgaagtggaaagtgctgttcttggaggacaagctggcacccttagctgaggtgtgtcatgttgtccagtgccctgcatcgtaggctgccgattcagtgtggacctagaatgttcgacctaggactagcttccaatactgtcctgccatcactctgatttgactttgtggtgagcgtcaccacatgacaggggtgtgccagcccatcgaagcaggacagacacaggtggattgtgccccagggtgggatttgtgtgctctatgctccatgtcaagccatgtgaaggtcaggacccttctgaagcttttcttccaatggtacgttgtttgaagatgctttcctgtcacacctaaacatttggaaatatcccactgacaagaacacattgtaaaacaaaactttaattaaagagtaatatatggca

SEQ ID NO: 1211 - DNA, 660 bp, Rattus norvegicus
  Genbank Accession No. U19485
ttcccggtgtatgactatgacccttcctctctgcaagaagctctcagtgcctcagtggctaaggtgaactcgcaatccctgagtccttacctgtttcgggcgacgcggagctccctgaagagagttaatgtcctggatgaagacacactggtcatgaacttagagttcaccgttcaggaaactacatgcctaagagagtctggtgatccctccacctgcgccttccaaaggggctactctgtgccaacagctgcttgcaggagcacagtgcagatgtccaagggacaggtgaaggatgtgtgggctcactgccgctggcgttccacatccgagtccaacagcagtgaggagatgatttttggggacatggcaagatcccaccgacgaagaaatgattatctacttggctttctttatgatgaacccaaaggagagcagttctatgaccggtcgattgagatcacgaggaggggacatcctcctgcccatagaaggttcctgaacctccaacgcagagccagagtcaattctggctttgagtgacatcctggagattccatgaaagaaagagaagcagaagctgaaatgaaggacatggagaattgtgtctttttcctttgataagctccactttgcaataaagatcttccccttcctgta

SEQ ID NO: 1212 - DNA, 2310 bp, Rattus norvegicus
  Genbank Accession No. U19614
tagaatcgaaccgcggaaagtccatcgtccctatcgaccaacagctacgtaaacaactatggcgggagagaggtggcgggccgaggggctgggagaaggatgggccatctacgtcacacccagagcccccatccgggagggaaggcggaggctcgccactcaaaatggcgacgggagtgacgcgcctgcgtacgaaactcatccgtcgcgccacggacgacgggaagtgaggttttcagaagagccgccagaagtgtacggcgacttcgagccccgggcggccaaagaaaggtctccgggggaaagacgaaccccgccagaaaagttccggtcggattctgcgaaagaggaagtgagagaaagcgcttacaatcttcggtctcgacaacggaggcagcggggaccccaggaagccgaggagatgaagacgcggaggtctactcgtctggagcagcactcacagcaggcgcagcagcagctgtcaccggctacgagcgggcgaggattacgggacgctcagtccttaagtgaggaccgcggagaggatgaaccttcttcccaacctgttacaagccaaacagtctcaaagaaaactgtcaggacaccagagacttcagtgatgagtgaagatcctatcagtaacttatgcagacccccattaagaagcccaagacctgacgcttccattgtccaacacatcaacccctttgaggaagatgaagccgcagtagcagccggtcaccatccagactcactgtgggggttaccacacagtcggggggacttcacagctcatgagaatcaaccctcactgctgcccacaggatgtcaaaaaaaccctcaagagtgggttgaacaagctgtgagaatgaggactagaatggcatataacaacattcagaaatcagactttggaaaccaatctccatcaacctccaggcaacaagcagctgtacaacccccagatgagtcttctgtcaagataaaatggtggctgctgatacttgttgctgctctggccatgggaatatattggttctttcatactcctgtagtagaaatcactgcagctcaggatgctgcggaagtgctcaagtgtctgagtgaacagatcgccgatgcctactcttccttccgcagtgtccgtgccatccggatcgacggagcaggcaaagctgctcaagacagtgacctcgttaagcacgaagtcgatcaggaactgacagatggatttagaaatggccagaatgcagctgtggtccaccgcttcgaatccctgcctgcaggctcaaccttgatcttctataaatactgtgaccatgaaaacgcagccttcaaagatgtggccctcgtcttgacggtactgttggaggagcagacgctggaagccagtctaggcctaaaggaaattgaggagaaagtgagggatttccttaaagtcaagttcaccagctctgacacggccaactcctacaaccacatggacccagacaagctcaatggactctggagccgcatctcccacctcgtgctgcccgtgcagcctgagaatgctctgaaagcaggcagctgcttatgagggaaagaagcggaaatcctgtctcgagtttgaaccattttcagactttgtaaccagagacggattttggagcagtttttgaaaactggtttctttttaaaggaagtaaagttcatacataaaggtggaataactaaatcatttatgcagcctacttctctgtgatttgggagaatcgtttttctatttccacctagaaccatgttaaagatatttagcatagtgcacagtatatgcagtccccgagtgtctgctaccttgattctggccgaatcattcttgctgtgtgaccagcgagaagggctaggttcctctctcaagcaatcagctttctattgaattttggatttgtgtttgtgaccttattaatgtctgacaaccccctaattgtagctatggatttccctgttacttcttctctcataccattgaaatgtgtggtccttagtttctacctataaaaataaaactgggtgtgcagtttagccagcccctcccccactggtttgtagagagggagacaagggtgtgggaggtagaaagagaagagaaattgtttaatagggaagggaaggaaggaaggtaaaaagatgttgcaagctgggcatggtaagccagcctgttatcccagtattgtcccagtagtcaggaggagcagaggttcaaggtcagcctcatctatagagtgagttttctgccacctggactacatgagacactgtcttaaaaac

SEQ ID NO: 1213 - DNA, 975 bp, Rattus norvegicus
  Genbank Accession No. U21718
ctgatcaacaacttcagggtgatgggaaaataattgataggagaccagaaaggcgaccacctcgtgaaagaagatttgaaaagccacttgaagaaaaaggtgaaggaggtgaattttcagttgatagaccgatcatcgaacggcctatccgaggccgaggtggtcttggaaggggtcgaggtggccgtggccgtggaatgggccgaggtgatggatttgattctcgtggcaagcgtgaatttgataggcatagtggaagtgatagatctggcctgaagcatgaggacaaacgtggaggtagcggatctcacaactggggaactgtcaaagatgaattaacagagtcacccaaatacattcagaaacaaatatcttataattgcagtgatttggagcaatcaaatgtgactagggaaacacctgaaggtgaagagcacccagtggcagacactgaaaataaggagaacgaagttgaagaggttaaggaagagggtccaaaagagatgactttggatgagtggaaagctattcaaaataaagaccgagcaaaagtagatttaatatccgaaaaccaaatgaaggtgctgatggacaatggaaaaagggatttgttctgcataaatcaaaagttgaagaggctcatgcggaagattcagttatggaccatcatttccggaagccagaaaatgatataacgtctcaactggagatcaatttggggagacctaggccgcccaggacgttgtgggagagagaggacgtcgtggacgtggccgtggtggtcgtcctaatcgtggcagcaggactgataagtcaagtgctttctgctcctgatgtagatggccccagaggcattcccccgctctggcctaactggatgccataatacaacactggttcctttgtggaccctcctgttcaaagcttttgcatgcttacttttgcatgcttaaggatcccaaacaactaagaatt

SEQ ID NO: 1214 - DNA, 428 bp, Rattus norvegicus
  Genbank Accession No. U21719
caccctaacctaaaccttttgaattttgaattaatgggtaccctatagaaaaaatgacctgcggaaaaccaaacagtgaagggaaagaaggaaagaattccaattgacacaatttaaataaaatatggcttttcaaataaaggaagagaagtttcttttgggcacacaatctaaacaatatttatgtataattcagctcttatttggcttaaatgggcttagtgggaaatgttatcatttttactattttctacagagaaaatattttccagtttatcaagtaactctggactttggaattacctgtttttatgttccagctgtctatatagttgtttctctgaaattgtacataaaatgtttttacattaaaatgaattactgtataaagtactgcattatgcataataaagatactaatgctttat

SEQ ID NO: 1215 - DNA, 1686 bp, Rattus norvegicus
  Genbank Accession No. U26356
gatccaagaatgggtgccgtggctgcctgaaaggccagtgcggaaagacgaaagggtccagaacaggcaacagttttgcaggttagcttcacatcggaaatcacttttgtctgagcatccttttagagtgtctgtcttagggatgcctctgtagtggtctctccatgtggtaaccactctacctgtgggagtctttcttcggagtcctctgaatgtgccaacatcccctgtaggctctattctaaaggccccttctcactctctgtcttagggtcaagaggttatctgtctccaactttgatttatattgagacaggaatctccaccctccccacatactggttactgttcctggtagagaagtctagggctggcaaaggcacaattgaagtcagggctggctcaatcgggccatcttctctgccccataccctccctacctctggctaagggggtcggagtgtgctcagcacaagaacccatcgaccttccccgctactgtccatggttgacaaggtctagaaaggagctctccaaactcaagtccgcaacccacaaagtgtttggcctggacaccagggccacgggggtccaggaacggaagaaacatgcctactcatccccctcatttatgtccatccgtcatttatgtcccacataatcctgcaaggaccgttgcttgctttcctaaagtcacttcctgactaatctctgcctgagcccgcttggaaggagggacccgggagctgataaagaaaagaaggtctccaggctctctgcagagtcagaaagtgtaactcaccggggcaagaagatgggacgcagctaaccgatctggagcccttgaggctgaagtttttaagcaccagggaaaggagaaagccactcccaagtccaaagtgtcaagtttcctcctccgctgattcgagagagggagccgcccctgctgtactagccaccccaccacaggcctgcgactggacacagcttgatgaggagggatcataggtccttatctctcccaattatgagtgctactcgggagtctgtgttagaagggactgctgctgctgctgctgctgctgctgctgctgctgctgctgctgctgctgctgctgctgcttgaaaaaattaaaaacaaaacaaaaccaaatgtacttggggaaatcagcactgggaagccccttctgagaaattcgaggtccaaaggcacttggagagccccaaactaaagccccgtagtgggacccctattgaaattctccactgagttctaagacagaagcccctcttggagacgcacaggctaagcactcctgggcagaatccttccctttccctgctcagccggtaccgcagcacccagcaccacagcacccttcccacgacctccttctctttcacctccttcacgcaagattcggggaggtggtgcaagcaggagtggaaagaaacagcagacatccattccctcctgggagacagagggcgcctctgtccactcctggccctagcccttcgggtgtcgtttgtgaaggggtggagccgtcgggaggagggtcggcagtaaagacaggtctccccacactgctccggggccacatttgcagcgcgcccttctgtcaagaacctgctccgacgtcagccgaggccaaccgtgagtatcctaccctgcttagataatcg

SEQ ID NO: 1216 - DNA, 1947 bp, Rattus norvegicus
  Genbank Accession No. U27518
ggcacgagaggactttgatcttcaggatgcctcagaagtggatttctgctctgctcctactgcagataagtttctgcttcagatctgggaactgtgggaaagtgttggtgtggccattggaatacagtcactggatgaatttaaagataatactggatgaacttgtacagaggggacatgaagtcactgttctcagaccttcatcttccgtctctcttgatcccaaaaaagcatctggtcttgtatatgaaacatctcctacaacttccaataatgatgaagtagaaaagtctttttacccagtgggtgatatgtggacatacgatgtgccaaaatatacatgtttgagatactacccatctttgaacaaaatgttcgggcaattttctgatttgtggttacagctttgtagagaagttgtttcaaacaaggaacttatagcaaaactaaaggaatcccagtttgatgtggttctttcagatgctgttggtccctgtggtgagctgatagctgagatactgcagttaccatttgtgtacagtcttcgctttgccaccgcccctggaatagaaaagtacagtgcaggacaacccttccctccctcttatgtacctattattttgtcaggatttagtggtcaaatgacattcatggagagagtggaaaatatgctatgtttactttattttgattcctggttcgagtcatttcctgctaaggattgggatccatttttcagcgaaattttaggaagacccactacaatggttgacacaatgaagaaagcagaaatatggctcattcggtcctactgggacttggagtttccccgcccatccttgccaaacattgagtttgttggaggacttcactgccaacctgccaaaccattacctaaggaaatggaagactttgcacagagctcaggagaacatggtgtgtgggtgttttctctggggtcgatgatcaggaacataacacaagaaagggctaacacaattgcatcagccctggcacaaattccacaaaaggttttttggagatttgagggcaagaaaccagacaccttaggacccaatactcgggtgttcaagtggataccccagaatgaccttcttggtcatccaaaaactaaggcttttgtaactcatggtggagccaatggcatctatgagtcaatccattatgggatcccccccatggttggcatccctttatttgcagaacaacgtgataacgttgctcacatggtagccaaaggagcagctgtttctatagattttcatacaatgtccagttcagatttgctcaacgcactgaaggcagtcatcaataacccctcctataaaaagaaagtgatgtggttgtcagccattcaccatgaccagcctctgaagcctctggacagagcagtcttctggattgagtttgtcatgcgtcacaaaggggccaagcatctgagaccacttgcacataaccttgccctggtatcagtacactctctggatgtgattggattcctgcttgcctgtgtgctggccattgttttacttgctgtaaaatgctgtctgtttctttaccgattttttgtaaaggtggcaaagaataaaagggactagggttctttaagaaggaaggctgtgatctgtggtcgtgatgggcatgactactccctttattgctggaactatatatcagatgctccttgttttagaagacattgagctaattgatttatctatagatgtcacactataggttaagaaagtaaccgttttaaatctttattttctcaaatccaccgttttcatattgattctcgatgtgatagtgctgaggataatgataatccctgaaacaccaacttgcttatgggcaaagatataggaagcctaaactttttactgtgaattttcagatatttataaaataaaattgaataaaatt

SEQ ID NO: 1217 - DNA, 1700 bp, Rattus norvegicus
  Genbank Accession No. U28504
agtggatggagaccaagtccatcaattagaagataagtctcaaatggagaaccggtgcctccccaagaaagttccaggtttctgttcctttcggtatggactggctatccttttgcacttctgtaacattgtcatcatggctcagcgagtgtgcctgaacctcacaatggtagccatggtgaataaaacagagccaccccatttatctaacaagtctgtagcagagatgctggataatgtaaagaaccctgtgcattcctggagtcttgatattcaagggcttgttctcagttctgtcttcttgggtatggttgtgattcaagttcctgttgggtacctatctggagcatacccaatggagaaaataattgggtcttcattgttcctcagctctgtgctgtccctgctcatcccaccagctgcacaagtcggagcagctttggtcattgtatgccgagtactccaaggaatagcccagggagcagtgtcaacaggccagcatggaatatgggtcaaatgggcacctcccttggaacgaggcagacttacctctatgactctatcagggtttgtaatgggaccatttattgccctgcttgtgagcggcttcatctgtgatcttctgggttggcccatggttttctacatctttggtattgttgggtgtgttctgagtcttttctggttcatccttctctttgatgaccccaacaaccacccatatatgagcagcagtgagaaggattacatcacatcctctctcatgcaacaggtgcactcaggcagacaatctctgccaatcaaagctatgcttaagtctcttccactctgggccattatcctcaatagctttgctttcatatggtcgaacaatcttctggttacatacacgccaacatttattagcaccacgcttcatgttaatgttagagagaatgggctgctgtccagcctcccctatctgcttgcctacatctgtggtatcgtagcaggtcagatgtcagacttcctcctgtcaaggaagattttcagcgtagttgctgtccggaaactcttcaccacactagggattttctgtcctgtgatttttgtcgtgtgcctgctctacctgagctacaacttctacagcaccgtcattttccttacacttgccaactcgacacttagcttttccttctgtggacaacttatcaatgccttggatattgctcccagatattatggatttctaaaggcagtcacagctttaattggaatatttgggggcctaatttcttcaactcttgctgggttgatccttaatcaggatccggaatatgcttggcataaaaacttcttcttgatggcaggcattaacgtgacatgcctggctttctaccttctgtttgcaaaaggagatattcaggactgggctaaagaaacaaaaaccacacggctgtgaagttagtagaagagtgagcacctgagaaacatgaggtcagcatccatattgaaaggaagaggattctgtgtgggactgcagtcatgggagtcatgaacacctgaagaccggtagcctgaagcttttaagggagtcattgcctcccactttagtctgagtgattcttttgcactgtgtattgtgtgtaacaagttatacttctgactttaaagaggaatctgtctgtcttcctatgatccaataaacaaacgtattcggg

SEQ ID NO: 1218 - DNA, 1998 bp, Rattus norvegicus
  Genbank Accession No. U33500
ggtgctgctgctgcatgtctgactgagaagggagccgagcatctgaggagcaagacatcagaaggctggagtcccttccctgactaggccagagctaaaaggacaaggctcagggctagcctctgcctatctagttcttttctccctgaagcttacaccatcctgtgggagccgatgcccgtctcattttgactcagagtctgtccctctgcttgtcttctacaaaccatgtggctgtacctgctggcactggtgggcctgtggaacctcctgcgcttgttcagggagaggaaggtggtaagccatctccaagacaaatatgtcttcatcacgggctgtgactcaggctttgggaacctgctggccagacagctggacaggagaggcatgagggtgctggctgcatgtctgactgagaagggagccgagcagctgaggagcaagacatcggacaggctggagacagtgatccttgatgtcaccaagacagagagtattgtggcagccactcagtgggtgaaggagcgagttgggaacacaggactctggggcctggtcaacaatgctggcatctccggccacctgggtcccaatgagtggatgaacaaacagaacattgcaagtgtgctggatgtgaacctgttgggcatgatcgaggtgactctgagcacggtgcccttagtgaggaaggcgaggggccgtgtggtcaacgttgccagcatcgcaggccgactgtctttttgtggtggtggttactgcatctccaagtatggtgtagaggccttctcagactccctcaggagagagctctcctattttggggtcaaggtggctattgtagagcctggcttcttcaggactgatgtgaccaatggtgtcacattatcatcaaacttccagatgctgtgggaccagaccagctcagaagtcagggaagtctatggcgagaactacctggcatcttatctgaaaatgctaaatggattggaccagaggtgcaacaaagatctgtctctggtgactgactgcatggagcacgccctgacttcctgtcaccctcgcacccggtactcagctggttgggatgccaagttcttctacctccccatgagctatctgcccacctttcttgtggatgcccttttctactggacttctccaaagcctgagaaagctctctgaagtctttacctatgtacataactgaggagatgttggtacagtgttagggaggggatcctgaggaggaggtcggagtgctgaggagggagggaggtcattcctctggggtttagtccacactcttcattttgctaattttcctgtgctactactcaaggctgactcgactgacccaagaaatagccaaagaattctgcgaagaagttcaaatacaaaagtgctggcagttgcctagcctctgggcaccatgacctaccatggcgatccacacaaatggggagtttgagaccagcttgtaccaaacactgccctgggtccccctgtgcaggaagtgcacatgccctggctagtttgtaccctatgcagcatagaagtgtccctgctctgaagtcacctgtgaccctggtgtcaggtttgagaagaatcactaataattctaacactcatgcttgaaggccaggtcgcagcctgggtgggagagtcggttacttgtggtgagaatatagtagaggatagagacattaattttttttaaatttactttgaagtcatggctcttcttttcttttttggagtcttttcctttttagagcatagcatgaggtgacctcttgttccctgtgatttaaacaatggcattgctggttggtgaggtttggattgcaggggtaaggggaatgtcctgagaagggtgtgcataggccagcaggaatttccttgcccgtctcagcccttctagccactgaggtgggaataactgctgtccattcaaaacttaacaacaacccctaaggcataagagcatgcatgcaggcc

SEQ ID NO: 1219 - DNA, 347 bp, Rattus norvegicus
  Genbank Accession No. U42719
cagacccgcaactttctggtccgggcttcttgccgccttcgtttggagcctagcaaagagtacttaatcatggggatggacggagtcaccagtgacctcaagggagacccccagtacttgctggactcaaacagttggatcgaggagatgccatctgagcacctgtgcaggagcacccgtcagcgggcagcctgtaccagctcaatgacttcctgcaggagtacagaagccaggggtgccaggtgtgagggcgtcggactctggatccctgagctcagccccagggtcagggcctctcacgaagcagggcctgcttaacagggtaaataaataaaacttttgacagt

SEQ ID NO: 1220 - DNA, 3273 bp, Rattus norvegicus
  Genbank Accession No. U51898
gaattcggcacgagcttatctggcctccttgagtgttcccggcttctgtcctttgatcccctggcgtccccaactcccatccggtgaccgattcttctccgttgccgccctcagtttccctaacttcctaaatcaacccatcccccaatcattgcccgactttcaccctggacggtccactgtccccagctcctccctctgcgcttctgagtggccctgattttctgcctcattgcccgatttcccccccaacaccacctgtttcctgcgtccctccctttatgcccaccccccaacgcccatttctaactctctgcttatcttgtgcctccgcgtttcttctgctcccacgtgttttctagcgtccagtcctgggttcacctctagctcccacagatgacctggaagctggtggcagggagctgtgacccagagcacaggggcaggctgggtcgcctacctgtcccacataggatgcagttctttggacgcctcgttaacaccctcagtagtgtcaccaacttgttctcaaacccattccgggcaaaggaggtgtccttggctgactatgcctcaagtgaacgtgttcgagaggaagggcagctgatcctgttgcagaatgcttccaatcgtacctgggactgtgatctggtcagccctaggaacccacagagtgacttccgactcttccaactggagtcagaggcagacgtcctggtgaacttccagcagtattcctcccagctgccaccgttctatgagagctctgagcaggtcctgcatgtggaggtgctgcagctgacggacctcattcggaaccaccccagctggacagtgacgcacctggccgtggaacttggcattcgggagtgtttccatcacagccgcatcatcacgtgcgccaacagcacagagaatgaggagggctgtaccccactacatctggcctgccgcaagggtgacagtgagattctggtggagttggtacagtactgccacgcccagatggatgtcactgacaacaaaggagagaccgccttccattacgctgtgcaaggggacaatccccaggtgctacagctcctaggaaagaatgcctcagccggcctgaaccaggtgaacaaccaagggctgacgccgctgcacctggcctgccagatggggaagcaggagatggtgcgtgtcctgctgctctgcaatgcccgctgcaacatcatggggcccggtggcttccccatccacacagccatgaagttttcccagaaggggtgtgctgaaatgattatcagcatggacagtaaccagatccacagcaaggatcctcgctatggagccagcccgctccactgggccaagaacgctgagatggcccgaatgcttctgaagaggggctgtgacgtggacagcacaagtgcctcggggaacacagccctgcacgtggctgtgacgcgcaaccggtttgactgtgtcatggtgctgctgacctatggggccaacgcaggtgcccgaggagagcatgggaacacaccactgcatctggccatgtcgaaagataacatggagatggtcaaagccctcattgtatttggggcagaagtagacaccccgaatgactttggggagactcctgcattcatagcttccaagatcagcaagcagcttcaggacctcatgcccgtctcccgagcccggaagccagcgttcatcctgagctccatgagggatgagaagcgaacgcatgaccacctgctctgcttggacggagggggcgtgaagggcctggtcatcatccagcttctcattgccattgagaaggcctcaggtgtggctaccaaggacctcttcgactgggtggcaggaaccagcacaggcggcatcctggccctggccattctacacagtaaatccatggcctatatgcgtggcgtgtacttccgtatgaaggatgaggtgtttcggggctcacggccctatgagtctgggcccctggaggagttcctgaagcgtgagtttggggagcacaccaagatgacagatgtcaagaaacccaaggtgatgctgacagggacactgtcagaccggcagccagcagagctccacctcttccggaattacgatgccccagaggccgttcgggaacctcgctgtaccccaaacattaacctgaagccgcccacccagcctgcagaccagttagtatggcgggcagcccggagcagtggggcagccccaacctatttccggcccaatggacgcttcttggatggtgggctgctggccaacaaccccacactggatgccatgactgaaatccatgagtacaatcaggatatgatccgcaagggccagggcaacaaggtgaagaaactctccatagtcgtgtctctgggtacaggaaagtcccctcaagtgcctgtaacctgtgtagatgtctttcgtcccagcaacccttgggaactggccaagactgtttttggagccaaggaactgggcaagatggtggtggactgttgcacagatccagatgggcgggctgtggatcgtgcccgggcctggtgtgagatggtcggtatccagtacttcaggctgaacccccagctaggctcagacatcatgctggacgaggtcagtgatgcagtgctggtcaacgccctctgggagaccgaggtctacatctatgagtaccgggaggagttccagaagcttgtccagctgctgctatctccctgagcccggcctgctggcaggagtggccggcgtggcacactgcggccaggctggcctgccgctccatgtccatctgagactagggctcggagcgggcagttccccatgaggtacctctcctgatccatccgcactttactaatccagctgaaagcccagagttccctcggccccttcccctgactatgaaggacaactgattccatctactacccatatatcagagatcaacactaagggccagtgtcgagagggccctcccaggctccctggccactgctgcccaccccctctcccacttcctgatgtcagggattagagaaatgttccaccccgtcatcaggtgaaatccaggctaatgaaacccagcgccattctgccattcgactttgcccctcgcacctgcagcctctccaccctgcagccgccccacaaggagcgctcctagctcccaaaggtcaatcctgtgcacatgctcttctctggaaggagagtggggagggctcaaggccacctcaactgtgaaataaacggttttacactcaa

SEQ ID NO: 1221 - DNA, 2006 bp, Rattus norvegicus
  Genbank Accession No. U53184
gcgcgcgcggccagcgagacctcccggctccactggcggcgcgggcggcggtaaaatgtcggctccaggaccttaccaagcagctgcaggcccttctgtaatgcctactgcacccccaacctatgaagaaacagtgggtgtcaacagttactacccaacgcccccagcacctcagccgggaccagccacagggctcattacgggcccggatgggaagggcatgaatccaccttcgtactacacccagcccgtgcctgtccccaacgccaacgcaattgcagtgcagacggtttatgtgcagcagcccatctccttctacgaccgccccatccagatgtgctgtccttcctgcaacaagatgatcgtgacccagttgtcctacaatgcaggagccctcacctggctctcctgtggcagtctgtgtctgctgggatgcgtcgctggctgctgcttcattccgttttgcgtggacgccctgcaggatgtggaccattactgccccaactgcaaagcgctcctgggcacctacaaacgtttgtaggactcggccagccacaggggaggtagacaagtgctcccggaagtcacccaacccttgcccagcgcagccagaagacgtcccttccttgatctcttcatgagctcgtcttcgtgtcttttagggggtggggaaagtcggaaaagtaacaaacccccaaacccagaaactgctgctggagttgtgccctgcacatgcaaagacgtggaccttgggtgttgctttaagggtttaccgcctgatctcgttaccccactaactgtgattgttactccatttgcatctcgtctgctgatttgccactgcctgccccctcttcctcaagaagaggccttcctggtgccaggctcaaaacccgaagctacagtttgccttatttttcactgtttggcttgatctgtaccatctctcccagccctaatgacagagaccttgccttaaagactttgcggttctgtaattgcagacttctccagcactcagaatcactttcaattccatagagttgttcctctccacacacacccctcccccggtgcacagaagggctgccgacacccaccagactcatacagagaaggtcacaagtactaaatgaaaggctcccagcccaccttgtctcagcccctgtcctgtgaagggactccttcctcacacagtttctgtgacttccttttgttcttaaacacatggaagttacttggcagggagacatttctagaataatttttgtgatcacgatacacccttcattctccgtttgctggtatgtttttagttggtttggttttagttttccacatacagtctagctcgtggccagccttgagctccgaggagatcctccatcttctcctctcaaatacccagggcccagacatttgcctctgcacctgctgggctttttctctcatttttccttaaccagaaaaacaaacgggtaatttcatcgactgcctatgtaggtttggtgtggttttgaaaaccttgtttccatggggccctttgggggagtcagggggcccctgcacgagcccatgcttcaatgccgagagattggctgctggaaccccctgaagcatgatttcatgttttagagatgagcttctgtggtacggtcatcatggtctccaacatcaacagacaaggtagaaggatgtcaacgacaaagataagttcagggctctttctagggtcaccactctgtcctgtgtaacactgacacagtctggccagcctttcaggaggtcctggctccctcctaaacccatgtaggwcttgctgcaagtaacagtgtatgaagtcaacctgacctggaacagaagtctgcatattggttaagatacagcctatgtatcttcatacaacgatccagaagtactagacatcatttttgcagtgaattatgggtaccatacatgactttgatgatatctgcttttaaacaaataaaatctttgatcactca

SEQ ID NO: 1222 - DNA, 661 bp, Rattus norvegicus
  Genbank Accession No. U53214
atgtacaccttcgtggtgcgccaggagaatagcagcgtctacgccgaggtctcccggctgctgctggccaccggctactggaagaggctgcggcgggacaaccccaggttcaacctgatgctgggcggaaggaaccgactgcctttcgggagactaggacacgaacctgggctggcacagctggtgaactactacaggggggccgacaaactgtgccgcaaagcttccttagtgaagctagtcaagaccagtccggaactgtctgagtcctgctcatggttccccgagtcctatgtgattcatccaactaacctcaagacgccagtcgctccagcgcagaatggcatccagcttccggtcagtaactccaggacagatgagagagaattcttcttggcttcttataacagaaagaaagaggacggggaaggcaacgtttggattgcaaagtcatcagctggtgccaaaggcgaaggcatcctcatctcctcagaggcgtcagagcttctggattttatagacaaccagggccaagtgcacgtgatccagaaatacctcgagcaccctctgctcctcgagcccggtcaccgcaagtttgacattcgaagctgggtcctggttgaccaccagtataacatctacctctacagagaaggtgtgc

SEQ ID NO: 1223 - DNA, 1511 bp, Rattus norvegicus
  Genbank Accession No. U55765
gatgaagggaagtggcccctggcctccacagctgaccacatgagggtggtttctagcctctttcttcctgtgctccttgcagaggtgtggctggtgagcagtttcaatctcagctcccatacaccagaggctcccattcgcctggtgtctcaggattacgagaatcaaacttgggaagagtacgaatgggctgatcccagggatgataatgaatactggctaagggccagccagcaactctccaatgagacttcaagctttgggttcagcctgcttcgaaagatctccatgaggcacgatggcaatgtgatcttctcaccatttggcctgtctgtggctatggtgaacttgatgctgggggccaagggagagaccaaagtgcaggtagaaaatgggctcaacctacaggccctgagccaggcaggacccctgatccttccagccctcttcaagagagtcaaagagaccttttccagcaacaagaaattgggcctcacccagggtagctttgccttcatccacaaggactttgaaattaaaaagacctatttcaatctatccacaatgtattttgatacagagtacgtgcctacaaattttcgaaattcttcacaagccagagggctcatgaaccattacattaacaaagagactgaggggaaaatccccaagctttttgatgagattaatcctgaaacaaagttaattctggtggactacatcttgttcaaaggcaagtggctgactccatttgaccccatcttcactgaggctgacactttccacctggacaaatacaaggcagttaaggtgcccatgatgtaccgggaagggaactttgcctctacctttgataagaagttccgttgtcacatcctcaaactgccctaccaaggaaatgccaccatgctagtggtccttatggagaaatcgggtgaccacttggccctggaggactacttgaccacagacctcgtggagatgtggctccaggatatgaaaaccagaaaaatggaggtcttctttcccaagttcaagctgaaccagaggtatgagatgcatgagctgctcaagcaggtgggaattaggaggatcttctccacctcagctgacctcagcgaactctcagccgtggcacgaaatcttcaggtgtccaaggtcgtacaacagtcagtgcttgaggtggatgaaaggggaactgaggtggtgtcagggacggtgtcagagatcaccgcttactgcatgcctcctgtcatcaaagtggaccggccttttcacttcatcatctacgaggagatgtcccggatgctcctatttcttggcagggtggtgaacccgacagttctgtgactcgggcatgtaggacctcggccaccacaggtgctgagccagaggtgtctgaatcacaagacgctgttggtagacggtaaaggatgcattctctgtacccagccagtttgctatggctgttgtctgattaacactgaaattaaaatgactcatactttaaa

SEQ ID NO: 1224 - DNA, 3003 bp, Rattus norvegicus
  Genbank Accession No. U57391
gcgcccgccccgagagggtagcagatagtccctcggagtctccgccccaggggcatgtggagggtgtccaccgattaggatcgggtccgagtgattgaccacggggcccggagggtccgaacctggagcgcagcctgcaccctccaccacccgcccttctggaatgtcagaactaagccaagaggcaggtgcaccggaaaattgtgactgagccttcttggcagaagagaaactgagtcaccagtccaggaaccgcagggctgttggcgctcacctcgagtcttctggctgctttcctatttgctccctgcaggctccccctgtcctcctcctggggcacatcatgaatggtgccccttccccagaggatggggttttcccttctccaccagcgctgccaccaccccctcccccaagttggcaagagttctgtgagtcccatgcgagggctgctgccctggatcttgctcgccgttttcgcctctatctggcctcccacccacaatatgcagagccgggagcagaggctgccttttctggccgttttgctgagctcttcctgcagcacttcgaagctgaggtggctcgggcctcgggctcactctccccacctgtcttggctccattgagccctggtgtggaaatcccaccatcacatgacctgtcccttgagagctgcagggtgggtgggcccctggcagtgttgggcccttctcgatcttctgaggacctggctggaccccttccttcctcagtctcttcctctacaacgtcctcaaagccgaagctcaagaaacgcttctccctccgctcggtgggtcgttcagtcagaggttctgtccgaggcatcctgcagtggcggggggctgttgaatctccctcccaagctgggcctctggagaccacatcaggtcctccagttctaggtggaaacagcaactccaactcctctggtggtgctgggacagttggtagggcattggccaacgatggcacatcccctggggagagatggactcatcgctttgagaggctaaggctaagtcgtggagggggaaccttgagagacggagcaggagtgatacagagagaagagctgctgagtttcatgggggctgaagaggctgcccctgacccagcaggagtaggtcgtggaggaggggcagctgggctgacctcgggaggaggagggcagcctcagtggcagaaatgtcgattactgctccggagtgaaggagaaggaggaggaggaagtcgcttggagttctttgtaccacccaaggcatcccggccccgtcttagcattccctgttctactattactgatgtccgcacagccacagccctggagatgcctgacagggagaacacgtttgtggttaaggtagaaggcccttcagagtacatcctggagacaactgatgcacttcatgtgaaggcctgggtgtctgacatccaagagtgcctaagcccaggaccctgccctgctatcagcccccgtcccatgacccttcccctggcccctgggacctccttcctcacaaaggataacacagagagcctggagttgccctgcctgaatcattcagagagtctgcctagccaggatcttcttctgggacccagcgagagtaacgaccgcctgtcgcagggagcttatggaggcctctcagaccggccgtcagcgtccttctcccctagttctgcctccattgctgcttcccattttgactcaatggaactgcttcctccagagttgccccctcggattcccattgaggaggggcctccagcagggacagttcatcccctctctaccccgtaccctcccctggatactcctgaagcagccacagggtcattcctctttcaaggggaggcagaggggggtgagggggaccagcccctctcaggctacccttggttccacggcatgctctctcggctcaaagctgcccagttagtgttagaaggaggtaccagctcccatggtgtcttcttggtacgccagagtgagacaagacgtggtgaatatgtcctcactttcaacttccagggcaaggctaagcacctgcgtttgtcactaaatgaggagggtcagtgccgggtccaacatctgtggttccagtccattttcgatatgcttgagcacttccgggtgcaccccatccctctggagtctggaggctccagtgatgttgtccttgtcagctatgtgccctcccagcggcagcaggaacggagcacctcccgtgatccaacccagccctctgaaccccctccatggacagatcccccacatcctggggcagaagaggcgtcgggggcgccagaagtggcggcagccacagccgcagcagccaaagagaggcaagagaaggagaaagcgggcggcggaggggtccaggaagagctggtccccatggctgagctggtccccatggctgaattggaagaggccatagcaccaggcactgaggctcagggtggtgctggctctagtggggacttggaggtgtccctaatggttcagctccagcagttaccactagggggcaacggagaagaagggggtcacccccgagccattaataaccagtactcatttgtctgagatacctgcccaccctccattttcctgctcccagccttaagttgtgagactgggctgggtaaggacacagaggaaagtgggagtcccctccctacatgcttcctgacccttgtcagccaagggtgtgtatgttggtacaagtagaggttcaagagcccagttaagtccccagttactacactacaggtgcccttgccccgaggccaaggacttgggctccattacctccctgaggggctcttatggtcagccccatccctgggggctgtttcccccactaataacccccaacccaagcaagggtgagggggaagggctgtcagttatattaaggttgttgttgttgttttaaaccaaatggaaaagcataaataaataaagggtttatc

SEQ ID NO: 1225 - DNA, 2481 bp, Rattus norvegicus
  Genbank Accession No. U62316
tctcactatagggctcgagcggccgcccgggcaggtcggctggcgaggacacgtcaggggacataaataaataaataattccattcagcggatgacagcgaggcgaggcggctgcagctgggcggggggaccgggagagcagcggtgcgcaccgggtgtcagagccagagctgaggaccgaacccagggccttgcacttgctaggttgttttcgtctccagtagaagctcagaaatgccatcagagtcttcagtaaaggcaacggcggcgccgcctccattcccacttcctccggacggagggtggggctgggttgtagtctgcgcatccttcatctccattgggttctcctatgccttccccaaagccgtcacggtattcttcaatgacatcaaggacattttcaagaccacctccagtcagatcgcgtggatatcctccattatgctggctgtcatgtacgcaggaggtcccatcagtagtgtgttggtgaataactatggcagccggcctgtggtgatagtaggaggattactgtgctgtactggaatgatcttggcttctttcagcagcagtgtgatagaactttacctcaccgtcggcttcattggaggtttaggattagcattcaacctgcaaccagccttaacaataatcgggaaatacttctataggaagcgaccccttgcaaatggctttgccatggctggaagtcctgttttcttaagcacactggctcctttcaatcagttcctatttaacagctatggctggaaggggagttttttgattttgggggccatatttttgcactcctgtgtggccgggtgcctcatgagacctgttgggccaagtccacgtgctgcgaagtctaaaagtaaggttggctcaagacaagattcaagtacgaagagactcagtaaggtatcaacagcagaaaagattaatcggtttttagatttcggcctttttacacatagaggatttttgatctacctgtctggaaatgtcgtgttgtttttagggatgtttgcccctattatattcttggctccgtatgctaaggacaaaggagtggatgactataattcagctttcttgctgtctgtgatggcttttaccgatatgtttgctcggccttcggtaggattaatagccaacactagcttaatccgtccacgaatccagtacttgttcagcgtggcaatcatgttcactggcatatgccatctcctctgccccctagcccattcctacacagctttggtggtctacgttatattttttggaataggatttggaagtattagcagtctcctctttgaatgtcttatggaccaggttggagcctccaggttctccagtgctgtggggctcgtcactatcgtggagtgttgcccagttcttcccggccctcccctggctggtaaattgctcgatataactggacaatataaatacctgtacatagccagtgggatagtcgtgttatcatcaggcatttacctactgatttgcaatgctataaactatagacttctcgagaaggaaaggaagagagagaaagcaaggaggaagaaatcagcctcgcaggcatccaaagaaatggaggctttgagcagatctaaacaggacgatgttactgtgaaagtttcaaatacacacaatcctccctcagacagggacaaagaaagtagtatttaacaagtctcatctccgaatcagtgttcagaaatttaattatgagtttctttgtgtttttttcaatgaattgcaaaggattttagctgcaacaaaagatcgcaaacagtaacgaaactggtatcttcctcaatgacgaactaaaaatcagtgctttaatatttgttaaagatggttaacttttgagattgtgcacataaaaaatccacacagctgcttatctgcacaccaaagctgtgatgaaaatgaatttttttaaatcttctgccaacttttacttttagctatagaatgagatctgcatcccagaccccggctgacctaagcacaattcaacattaattccacataactaccctcttcaaggttcatttttcgtcggatactaagtcatgaagtgaattgaagacaatcattctttctattcaacacacaaagaattacacatgtagccacgcaaacactgagtaacgggatatcataaagaaataaatgaatttgagaaaattattatcatagtcatttttaagtcaaaggaaataagactctggcaagtgggaatgtaatatatttgtgtgcagtcatccagtgtggtttccaaataacagtctatgttgaaaattcaagtgttattaactcaaaacacgctaaaggggaaactatctacagtgggtgagtttggctaaacccccacacagctctactagttttcaccatcactctgccacatttgtgcctattttatccacatcacctgtctgcactgtttcagcacaatag

SEQ ID NO: 1226 - DNA, 3780 bp, Rattus norvegicus
  Genbank Accession No. U63839
gggcgacagcaatgtggcacatccctcctcggaagtgaagggacagaagcgtcctaggcctctccacccttgctgacggcttcgcgccaagggctgccatggccacggggttctcctttgggtccgggaccctcggctccaccactgtggcccccggcggcaccggcacaggcagcggattctccttcggcgcgtccagcacaccttctgtggggctcaacttcggaactctcggaagctctgcgacaccagcatctacatctacttctgccagtggttttggaacaggactctttggatctaagcctggcactggattcactctaggaggaacaagtgcaggaacaacagctactacatctgcatctacaacaggctttagtttaggattcagtaaacctgcagcatctgccacaccatttgccctgcccgtcacttctaccacagctagtggtcttactctctcgtctgctctgacatcagctccagcagcatccacaggatttacgttgaataacttgggagcaacaccagccacaactacagcagcatcaacaggactttccttagggggggccttagctggtttgggaggttcacttttccagagtggaaacacagcaacatcaggtctcggacagaatgctttaagcttgtctctggggactgcaacacctacttcagcagccagcagtgaaggccttggtggtatagattttagtacctcatcagataaaaagagtgataaaacgggaacaaggccagaggatagcaaagccctgaaagatgaaaaccttcctcctgtcatctgtcaggatgttgagaatctccagaaatttgtcaaggaacaaaaacaagtccaagaagaaattagtcgaatgtcttccaaagcaatgcttaaagtccaggaggacatcaaggccctgaagcagctcctgtcattggctgctagtgggttgcagaggaacacactcaatattgacaaactgaagttagaaactgctcaggagttaaagaatgcggaaatagctttaagaacccagaaaacaccacctggactccaacatgaaaatacagctcctgctgactacttcagagtcttggttcagcaatttgaggtacagcttcagcagtacaggcagcagattgaagaactagaaaaccatcttgccactcaagcaaacaattcacatataactccgcaagacttatcaatggctatgcagaaaatttatcaaacatttgtagctttagctgcacaacttcagtccattcatgaaaatgtcaaggtgcttaaagaacagtatctcagctacagaaaaatgtttttgggtgatgctggggatgtgtttgaagccaggagaacagaagccaagaagtggcagaatgcacccagagttactactggacccacgcctttcagcaccatgccaaacgcagcagccgttgccatggctgcaacacttacacagcagcaacagcctgctacagggccacagccgtctctgggagttagttttggaacgccattcggctcaggtattggcactggcttgcaatcaagtggcttaggttcttcaaaccttggaggatttggaactagctctggtttcggatgcggtaccacaggggcctccacatttggatttggaacaacagataaaccctcaggaagtcttagtgcaggctttggcagctcaagtacgtctgggtttaacttcagcaatcctggcatcacggcatcagctggtttgacatttggggtgtccaatcctgcgtctgcggggtttggaacaggaggacaactccttcagttgaagagacctcccgctggaaacaaaagaggaaagagatgaacctatgggtcgaggtgttggccgtgcttagctggcgccgctcattctatgattctatttttctaatgatgtagtgattgagctgcatctcgggagatttataatgttttgatattcctcactctggaacttgaactttgtttgtttaccttaccagacatccttcttgtgaactcaaaatccagttgcagttctgttgctattacttttgactccatgtaagaaatgttgtgattaaattaccaagtgatagtggtgggaaaaacaattcatcaacctaaacctatgatttttcctagtattaatagcaatttttttgttgctggggtttaagctgtgaatacatgcacattggtttcttatgcagatggtttgaactctcaggcctgtgctagaagtagtttgttccttgacaaggcctttggaactgtgctgcagggcatcttgtagatatgtatgtaattatatatagagaaatgcacacagtgtgtgcacataaaatatatttacacacctacaactcttgcctcagactgttatccttttctagtgtatttagttattcactctttatgctttaggtcctcagcgcttataaaaggagtaacttagggtacctggtcacttcgtttgttaattagacagaagtgattcttgataaagtatttaacccattcaaattcattgactccactcctgtttttatttattccttgacccttatctacgaggaatggtctaaggcgcatcaaacagattttagaaacctttattaccctatgtatatattctcgtgctacaactatggaatcttttgtaaggagattgtcttttaggagtgtacgtgaactccagactgatgctctggggcaaagagctactaagccaaattgaatctatgcaggtgaaggatgcaatgttaattcagtaagaacttgtttagctgtttcaatacagaattcttcttatagggctatggagaaaccaaatgaagtggcttctaagcctcttaatgtgctgagtcttaatctggactagagaaactacattttaggaaaactctttgtaccaactatgaacttgctggtttgaagagtgagtggagctccagtgagtgccacggagttgtgtcaggttgtgtctgtgacctctgtctgtgctgccattcttggtgtttcgtgagtgaacatccactgtgaagggaattgccttaggaccatgtcagcgagaaagtagtcttcaggtgggatgaacacatggaattgcacggaaatagtttaattttttacatagaaagttttgtatataatgttcatcagtgaatattttcaggatcattttcaccaaggcaccttttctttctaaaataggtgtggtatacatacatacatatacacatatatatttttagtataatgtcacttgtgtttgactataaaagcattgtggttctgttttatttatctgcatataacagtgattggcattcctgaattcaatatttgcatcttgatgcattaaaataaggagagttatttgtctttgagcactaaacctgtttttatttgtatattttgtaattctgcagccctcggtccagattatgggggaggataggaaagggtgtgctttggcatttgaagttactatcagagttacatatgccattacaaaacactgctttgttagtttcttaaatacggtgtattatgctgcaaatagctgagtatttatatttctctgggttacttttttctttatatacattttcatatgttgaaccactggagacttgtaacattcatttgtggtaggagtcagagtgttgtctttgtctcctttgtctttgccttgtctattatggaaataataaaattgtgttagttgctttgaaaaaaaaaaaaaaaaaaaaaaaaaaaaaaaa

SEQ ID NO: 1227 - DNA, 178 bp, Rattus norvegicus
  Genbank Accession No. U75404
tttttgattgtactcttctatgctggaccgaattcatatgcagatcgaagtcactcctgttctttacagatggtattttgatagatactggagtttgtctgtgttatatctgtccccttctttaagaacaatgttgcattacgttcctttggataaattgtgatttgacaactgattt

SEQ ID NO: 1228 - DNA, 2129 bp, Rattus norvegicus
  Genbank Accession No. U76714
gaggccgctcgagagcaggcttagggtctactgcggccggtggaccctccaacccgcttccataaggctttagctttccaacttcagctacagtgttagctaagtttggaaagaagacataaagaagaccccggtgggcagctttgctgttctttgccttagttgtcctttggggtctttcggcacaaggctgctgtgcttatagccgtgctatctccggttcctcacactcctgtgaagaagccctgggcaagagcagctaaagctactagcatccgaacaaacaaggggagagcgtctggtgccatgaccaagtcaagagatcagacccatcaggaaggatgctgtggatctttagcaaactacctgacctcagcaaaattcctcctctaccttggccactctctctccacttggggggatcggatgtggcactttgcagtgtctgtgtttctggtggaactctacggaaacagcctcctcttgacagctgtctacgggttggtggtggcaggctctgttctggtcctgggagccatcattggtgactgggtggataagaatgccagacttaaagtggcccagacgtccctggtggttcagaatgtatcagtcattctctgcgggatcatcctgatgatggttttcttacacaagaatgagcttctgaacatgtatcatggatgggtccttactgtctgctacatcctgatcatcaccattgcaaacattgcgaatttggccagtactgccactgcaattacaatccaaagggactggattgttgtcgtagcaggagaaaacaggagcagattagcagacatgaatgctaccattagaaggattgaccagctaaccaacatcctggcccccatggctgttggccagattatgacattcggttccccagtcattggctgtggtttcatttctggttggaatttggtgtccatgtgtgtggagtacttcttgctctggaaggtttaccagaagacccctgctctggctgtaaaagctgctctcaaggtagaggagtcagaactgaagcagctgacctcacctaaagatacggagccaaaacctttggagggaactcacctaatgggtgagaaagactctaacatccgtgaacttgaatgtgaacaagaacccacctgtgcctcccagatcgcagaacccttccgcacttttcgagatggatgggtctcctactataaccagcccgtatttttgggctggcatgggcctggctttcctctatatgacagtcctgggcttcgactgtatcgccacagtatatgcttacactcagggactgagtggttccatcctcagtgttttgatgggagcatcagcaataactggaataatgggaactgtggccttcacttggctacgtcgaaaatgtggccttgttcggactggtctgttctcaggactggctcagctttcttgtttgatcttgtgtgtgatctccgtgttcatgcctggaagccccttggacctgtctgtttctccatttgaagatatccgttctaggtttatacatgaggaggcagtgtcctcaactaccaaaatacctgaaacggaaatgcttatgtctaatgtgtctaatgttgtcaataccgtccatgagatgagtactaaatccgtccccataatctccgtcagcctgctgtttgcaggagtcattgctgctagaatcggtctttggtcctttgatttgactgtgacacagttgctgcaagaaaatgtaattgaatcagaaagaggcattatcaatggtgtgcagaactccatgaactaccttctcgaccttctgcatttcatcatggtcatcttggccccaaatcctgaagcttttggcttgctagtattgatttcagtcycctttgtggcaatgggacatcttatgtatttccgttttgcccsgaagactctgggcaaccagatttttgtttgtgctcctgatgaaaaggaagttacagatgaaagtcagcctaatacatctgttgtgtaaaatagtttagctgtggcccctgttactagatttgtggagagcatgtgtgcttattttgtactacagaattccaataaatgcctgcacttttaaaaaaaaaaaaaaaaaa

SEQ ID NO: 1229 - DNA, 429 bp, Rattus norvegicus
  Genbank Accession No. U77829
gtgaggcgaagctgagcaggaatggccctgtggacctctgtgatgggacatctggtggaatctcacaggcagttctgtggcaaagatggatgaaagctaaggactcatgaggaagctggataactgaacaaagccatgtacaagaatgggaagccagaaaatgggatggtggagtttgaatcaggtggacagttctaaaagtacaaatgatttcgtataaaggtaccacatgtgggtccctttaactgaaggcatggcaagctccacacaaggtccttcatttctgaatttcaagggctcctctgacaagtggacagtgcagtgggtgcaccttttccagaggtgactggatggatgcttgaacagaagatttgccaaatagacattgtgctgtcaagaattttaccattaaaagtgcattattgtagc

SEQ ID NO: 1230 - DNA, 3903 bp, Rattus norvegicus
  Genbank Accession No. U83119
aggaagcaagaaactaatcgtcttggcaacaaaacaaagagaatgaaagcacacaaacataacctcacatccaaatatgaatataaagggagcaataatcactattccttaatatctctcaatatcaatggcctcaactccccaataaaaagacatagattaacaaactggatacgcaatgaggaccctgcattctgctgcctacaggaaacacacctcagagacaaagacagacattacctcagagtgaaaggctggaaaacaactttccaagcaaatggtcagaagaagcaagctggagtagccattctaatatcaaataaaatcaatttccaactaaaagtcatcaaaaaagataaggaaggacacttcatattcatcaaaggaaaaatccaccaagatgaactctcaatcctaaatatctatgccccaaatacaagggcacctacatacgtaaaagaaaccttactaaagctcaaaacacacattgcacctcacacaataatagtgggagacttcaacaccccactctcatcaatggacagatcatggaaacagaaattaaacagtgatgtcgacagactaagagaagtcatgagccaaatggacttaacggatatttatagaacattctatcctaaagcaaaaggatataccttcttctcagctcctcatggtactttctccaaaattgaccatataattggtcaaaaaacgggcctcaacaggtacagaaagatagagataatcccatgcatgctatcggaccaccacggcctaaaactggtcttcaataacaataagggaagaatgcccacatatacgtggaaattgaacaatgctctactcaatgataacctggtcaaggaagaaataaagaaagaaattaaaaagtttttagaatttaatgaaaatgaagatacaacatactcaaacttatgggacacaatgaaagctgtgctaagaggaaaactcatagcgctgagtgcctgcagaaagaaacaggaaagagcatatgtcagcagcttgacaacacacctaaaagctctagaacaaaaagaagcaaatacgcccaggaggagtagaaggcaggaaataatcaaactcagagctgaaatcaaccaagtagaaacaaaaaggaccatagaaagaatcaacagaaccaaaagttggttctttgagaaaatcaacaagatagataaacccttagccagactaacgagaggacacagagagtgcgtccaaattaacaaaatcagaaatgaaaagggagacataactacagattcagaggaaattcaaaaaatcatcagatcttactataaaaacctatattcaacaaaatttgaaaatcttcaggaaatggacaatttcctagacagataccaggtatcgaagttaaatcaggaacagataaaccagttaaacaaccccataactcctaaggaaatagaagcagtcactaaaggtctcccaaccaaaaagagcccaggtccagacgggtttagtgcagaattctatcaaaccttcatagaagacctcataccaatattatccaaactattccacaaaattgaaacagatggagcactaccgaattccttctatgaagccacaattactcttatacctaaaccacacaaagacacgacaaagaaagagaacttcagaccaatttcccttatgaatatcaacgcaaaaatactcaataaaattctggcaaaccgaattcaagagcacatcaaaacaatcatccaccatgatcaagtaggcttcatcccaggcatgcagggatggtttaatatacggaaaaccatcaacgtgatccattatataaacaaactgaaagaacagaaccacatgatcatttcattagatgctgagaaagcatttgacaaaattcaacaccccttcatgataaaagtcctggaaagaataggaattcaaggcccatacctaaacatagtaaaagccatatacagcaaaccagttgctaacattaaactaaatggagagaaacttgaagcaatcccactaaaatcagggactagacaaggctgcccactctctccctacttattcaatatagttcttgaagttctagccagaccaatcagaaaacaaaaggagatcaaggggatacagatcggaaaagaagaggtcaaaatatcactatttgcagatgacatgatagtatatttaagtgatcccaaaagttccaccagagaacaactaaagctgataaacaacttcagcaaagtggctgggtataaaattaactcaaataaatcagttgccttcctctatacaaaagagaaacaagccgagaaagaaattagggaaacgacacccttcataatagacccaaataatataaagtacctcggtgtgactttaaccaagcaagtaaaagatctgtacaataagaacttcaagacactgaggaaagaaattgaagaagacctcagaagatggaaagatctcccatgctcatggattggcaggattaatatagtaaaaatggccattttaccaaaagcaatctacagattcaatgcaatccccatcaaaataccaatccaattcttcaaagagttagacagaacaatttgcaaattcatctggaataacaaaaaacccaggatagctaaagctatcctcaacaataaaaggacttcagggggaatcactatccctgaactcaagcagtattacagagcaatagtgataaaaactgcatggtattggtacagagacagacagatagaccaatggaatagaattgaagacccagaaatgaactcacacacctatggtcacttgatttttgacaaaggagccaaaaccatccaatggaaaaaagatagcattttcagcaaatggtgctggttcaactggagggcaacatgtagaagaatgcagatcgatccatgcttatcaccctgtacaaagcttaagtccaagtggatcaaggacctccacatcaaaccagacacactcaaactaatagaagaaaaactagggaagcatctggaacacatgggcactggaaaaaatttcctgaacaaaacaccaatggcttatgctctaagatcaagaattgacaaatgggatctcataaaactgcaaagcttctgtaaggcaaaggacactgtggttaggacaaaacggcaaccaacagattgggaaaagatctttaccaaccctacaacagatagaggccttatatccaaaatatacaaagaactcaagaagttagaccgcagggaaacaaataaccctattaaaaaatggggttcagagctaaacaaagaattcacagctgaggaatgccgaatggctgagaaacacctaaagaaatgttcaacatctttagtcataagggaaatgcaaatcaaaacaaccctgagatttcacctcacaccagtgagaatggctaagatcaaaaactcaggggacaacagatgctggcgaggatgtggagaaagaggaacactcctccattgttggtgggattgcaaactggtacaaccattctggaaatcagtctggaggatcctcagaaaattggacattgaactgcctgaggatccagctatacctctcttgggcatatacccaaaagatgccccaacatataaaaaagacacgtgctccactatgttcattgcagccttatttataatagccagaagctggaaagaacccagatgcccttcaacagaggaatggatacagaaaatgtggtacatctacacaatggaatattactcagctatcaaaaacaacgactttatgaaattcgtaggcaaatggctggaactggaaaatatcatcctgagtgagctaacccaaacacagaaagacatacatggtatgtactcactgatatgtggctattag

SEQ ID NO: 1231 - DNA, 676 bp, Rattus norvegicus
  Genbank Accession No. U85512
ggcgccgcccgcggacagagcagggagtaacggggactgtggtcgcgggcagccccagccactcaccatgccctacctgctcatcagcactcagatccgtatggaagtgggtcccaccatggtgggtgatgagcactcggatccagagctgatgcagcagttgggggcctccaagagacgagtcctgggaaacaacttttatgaatactacgtcaatgaccctcctcgaatagtcctggacaagctggaatgcaggggcttccgagtgttaagcatgacaggggtgggccagacgctggtgtggtgtctgcacaaggaatgacctgcttgagctgacttgtgcgtagggtatatattctttggagggatcgccatgtgccctgtccataatcttgcatcactgtctcccctgtcgctctctttccaaattgtcaacttccttgcccaacactgatgggctgtgaacagcctcaggaaccttgctgcggttggttgggtacagcaggccctgccccggctccttcagcttcccccagctggacctggacctgcctcttgctgtaggccatgtgcagaaggcaagctaccctgaggatggtccctggatcctacacagctaatccaagccaataaagggctctcacaagtgttgttcctcaaaaaaaaaaaaaaaaaa

SEQ ID NO: 1232 - DNA, 4413 bp, Rattus norvegicus
  Genbank Accession No. U90725
  misc_feature (1)..(4413): n = a or c or g or t
ggcgtcttgttcctgtttcgccacagttcctaccttatgagcttggattcctcacgctaataaaagaggagcagtaaaagctggcaggctgacagaggcaacctcaggacggactttctggctactgaccattttgctgtgtcttactaggattgtgtgtggacgtgagatcaaccatgagctccgttgcagttttgacccaagagagttttgctgaacatcgaagtgggctggttccacaacaaatcatagttgccacattaaattcagaagaagaaagtgaccctccaacctacaaggatgccttccctccactgcctgagaaagcagcttgcttggaaagtgcccaagaacctgctggagcctggagtaacaagatccggcccatcaaggcctctgtcatcactcaggtgtttcatgtacccctggaggagagaaaatataaggacatgaaccagtttggagaaggtgaacaagcaaaaatctgccttgagatcatgcaaaggactggtgctcacctggagctctctctggctaaagaccaaggtctctccatcatggtctcagggaagctggatgcagtcatgaaagcccggaaagacattgttgctagactacagacacaggcctcagccactgttcccattcctaaagagcaccaccgctttgttattggcaaaaacggagaaaaactacaagacttagaactgaaaactgctaccaaaatccagatcccacgcccagatgaccccagtaatcagatcaagatcactggcaccaaagaaggnatcgagaaagctcgccatgaggtccttctgatctctgctgagcaggacaagcgtgccgtaaagaggctagaagtggagaaggccttccaccccttcatcgctgggccgtacaatagacttgtgggtgaaatcatgcaggaaacagggacgcgaatcaacatccctccacccagtgttaaccgtacagaaatcgtcttcactggagaaaaggaacagctggctcaggctgtggctcgtattaagaagatttatgaggaaaagaagaagaagactacgaccattgcggtagaggtgaagaaatctcaacacaagtatgtcatcgggccgaagggcaactcactgcaagagatcctggaacgtactggagtctccgttgagatcccgccctcagacagcatctccgagactgtgatacttagaggcgagcctgaaaagctgggacaggcattgactgaagtctatgccaaggccaacagttttacagtgtcctcagtctctgccccttcctggcttcaccgtttcatcattggtaagaaagggcagaacctggccaaaatcactcaccaaatgccaaaggttcacattgagttcacagaaggtgaggacaagatcaccctggagggccccacagaagatgtgaatgttgcccaggaacagattgaaggaatggtcaaagacctgattaatcggatggactatgtagaaatcaacattgaccataaattccacagacacctcattgggaagagtggagccaacatcaacagaatcaaagaccagtacaaagtgtctgtgcgcatcccccctgacagcgagaagagtaacctgatccgaattgagggagacccacaaggtgtgcaacaggccaagcgggagctgctggagcttgcttctcgcatggaaaatgagcgcaccaaggatctaatcattgagcaaagatttcatcgcacaatcattgggcagaaaggtgaacggattcgagaaattcgtgacaaattcccagaggtgatcatcaactttccggatccagcacaaaagagtgagattgttcaactcagaggccccaagaatgaggtggagaaatgtaccaagtacatgcagaaaatggttgcagatctggtggaaaatagctattcaatttctgtaccgatcttcaaacagtttcacaagaatatcattgggaaaggaggtgcaaacattaaaaagattcgtgaagagagcaacaccaagattgaccttcctgccgagaacagcaactcggagaccattgtcatcactggcaagcgagccaactgtgaagccgcccggagccggatcctgtccatccagaaagatctggccaacatagctgaggtggaggtctcaatccctgccaaactacacaactctctcattggcaccaagggtcgtctgatccgctccatcatggaggaatgtggtggcgtccatattcactttcctgtggaaggttctggtagtgacactgttgtcatcaggggtccttcctcagatgtggagaaggccaagaagcagcttctgcacctggctgaggagaagcaaaccaagagttttactgtggatatccgggccaagccagaataccacaaattcctcattggcaaagggggaggtaaaatccgcaaggtgcgcgacagtactggagcccgcattatatttccggctgctgaggataaggaccaggacctgataacaatcataggaaaggaagatgctgtccgtgaggcacaaaaggagctggaagcattgatccagaacctggataatgtggttgaagactacatgctggtggaccccagacaccaccgccattttgttatccgaagaggacaggtattacgagagattgctgaagaatatggcggggtgatggtcagcttcccacgctctggcacacagagtgacaaagtcactctcaagggtgccaaagactgtgtggaggcagccaagaagcgaattcaggaaatcattgaggatctggaagctcaagtaacgctggaatgtgctataccccagaagtttcatcgttcggtcatgggtcccaaaggttcaagaatccagcagatcactcgggactacaatgttcaaattaagttcccagacagagaggaaaacccagttcacagtgtagagccttccatccaggagaatggagatgaggctggagagggcagagaggccaaggagaccgacccgggatctcccaggaggtgtgacatcatagttatctctggccggaaagagaaatgtgaggctgccaaggaagccctggaggcactggttccagtcaccatcgaggtagaggtaccctttgatcttcaccgctacatcattgggcagaaaggaagtggaatccgcaagatgatggatgagtttgaggtgaatatacatgtgccagcccccgaactgcagtcacacaccattgccatcactggccttgcagcaaatttggacagggctaaggcggggctactggatcgagtaaaggagctgcaggctgagcaggaagatcgggctttaaggagttttaagctgagtgtcactgtagaccccaaataccatcccaaaattatcgggggaaaaggggcagtgatcacacagatccgattggaacatgatgtgaacatccaatttcctgataaggacgatgggaatcagccccaggaccaaatcaccatcacagggtatgagaagaacactgaagctgcccgtgatgctatcctgaaaattgtgggtgagcttgagcagatggtttctgaggatgttcccttggatcaccgtgtgcatgcccgaatcattggtgccagaggcaaagccatccggaaaatcatggatgagttcaaggtggacattcgcttcccacagagcggagctccagaccctaactgcgtcactgtgacaggactcccggagaatgtggaggaagctatcgaccatatcctcaacctagaagaggaatatctggctgatgtggtggacagtgaggcgctgcaagtttacatgaagcccccagcacatgaagagtccaaggcaccatccaaaggctttgtggtgcgagatgctccctggacctccaacagcagtgagaaggctcctgatatgagcagctctgaagaaattcccacctttggggctcaagtggcccccaagaccctcccgtggggccccaaacgataatgatcaaaaagaaactttccagcctgctgcccaaacccaaccacacaatggtttgtctcaatctgactcagcagctggaccctcgtaaattgttgatgctccccctccccgaagtctcgcagcaaagcctggtgggctggccttctgtggctgcttcccctggcctggtcagcacccgcaggctcagggtctgctcctgacgctgtgctctgggaaagtgcacgccactgcgtgaaacactaagcaaggtaatcgagcatttcgtgatcacagactccagcttcctggtccacccagcatgtagtcagcattctgactttcacagcagagttccacagcggctaggagttgacttccttgtgtcatgacctcaggaaataaatttccttgactttataaaagccaaaaaaaaaaaaaaaaaaaaaaaaaa

SEQ ID NO: 1233 - DNA, 735 bp, Rattus norvegicus
  Genbank Accession No. X02904
acgcagctttgagtccacacctctgtctacgcagcagctatgccgccgtacaccattgtgtacttcccagttcgagggcgctgtgaggccacgcgcatgctgctggctgaccagggccagagctggaaggaggaggtggttaccatagatgtctggcttcaaggctcgctcaagtccacttgtctgtatgggcagctccccaagtttgaagatggagacctcaccctttaccaatctaatgccatcttgaggcacctgggtcgctctttagggctttatgggaaagaccagaaggaggctgccttggtggatatggtgaatgatggggtggaggaccttcgatgcaaatatggtaccctcatctacactaactatgagaatggtaaggatgactatgtgaaggccctgcctgggcatctgaaaccttttgagaccctgctgtcccagaaccagggaggcaaagctttcattgtgggtaaccagatttcctttgcagattacaacttgctggacctgctgctggtccaccaagtcctggcccctggctgcctggacaacttccccctgctctctgcctatgtggctcgcctcagtgcccgccccaagatcaaggcctttctgtcctcccctgaccatttgaaccgtcccatcaacggcaatggtaaacagtagtggacgaagggacaggaactccttgtcccccttttcccagactaataaagtttgtaaggcaga

SEQ ID NO: 1234 - DNA, 1121 bp, Rattus norvegicus
  Genbank Accession No. X05472
aagatgaactctcaatcctaaatatctatgccccaaatacaagggcacctacatacgtaaaagaaaccttactaaagctcaaagcacacattgcacctcacacaataataatgggagatttcaacacaccactctcatcaatggacagatcatggaaacagatattaagcaatgatgtcgacagactaagagaagccatgagccaaatgggcttaacggatatttatagaacattctatcctaaagcaaaaggatataccttcttctcagctcctcatggtactttctccaaaattgaccatataattggtcaaaaaacgggcctcaacaggtacagaaagatagaaataatcccatgcgtgctatcggaccaccacggcctaaaactggtcttcaataacaataagggaagaatgcccacatagacgtggaaattgaacaatgctatactcaatgataacctggtcaaggaagaaataaagaaagaaattaaaaactttttagaatttaatgaaaatgaagatacaacatacccaaacttatgggacacaatgaaagctgtgctaagaggaaaactcatagcgctgagtgcctgcagaaagaaacaggaaagagcatatgtcagcagcttgacagcacacctaaaagctctagaacaaaaagaagcaaatacacccaggaggagtagaaggcaggaaataatcaaactcagagctgaaataaaccaagtagaaacaaaaagtaccatagaaagaatcaacagaaccaaaagttggttctttgagaaaatcaacaagatagataaacccttagccacactaacgagaggacacagagagtgcgtccaaattaacaaaatcagaaatgaaaagggagacataactacagattcagaggaaattcaaaaaatcatcagatcttactataaaaacctatattcaaaaaaacttgaaaattttcaggaaatggacaatttcctagacagataccaggtattgaagttaaatcaggaacagataaaccagttaaacaaccccataactcctaaggaaatagaagcagtcattaaaggtctcccaaccaaaaagagcccaggtccagacgggtttagtgcagaattc

SEQ ID NO: 1235 - DNA, 591 bp, Rattus norvegicus
  Genbank Accession No. X14181
cttttgtgagtggcagtgaacgagcacgcactgctatgaaggcgtcgggcacgcttcgggagtacaaggtggtggggcgttgcttgccaaccccaaaatgccacacaccgccactgtaccgaatgcgaatctttgcacccaaccatgtggtggccaagtcccgcttctggtactttgtgtcgcagctgaagaagatgaagaagtcatccggggaaattgtgtactgtgggcaggtgtttgagaagtcacccctgcgtgtgaagaacttcggcatctggctgcgctatgattcccgaagtggcactcacaacatgtaccgagagtaccgggacctgaccactgccggcgcggtcacacagtgctaccgagacatgggtgcccgacaccgtgcccgtgcgcactccatccagatcatgaaggtggaagagattgcagctggcaagtgccgccggccagctgtcaagcagttccacgactccaagatcaagttcccattgccccaccgtgtgttgcggcgccagcacaaaccacgcttcaccaccaagaggccaaacaccttcttctagacaccagagacccactgaataaaag

SEQ ID NO: 1236 - DNA, 907 bp, Rattus norvegicus
  Genbank Accession No. X14210
tctttccgttcccagcgcagcatggctcgtggtcccaagaaacatctgaagcgcgtagcggctccaaaacactggatgctggataagctgactggcgtgtttgctcctcgtccatccactggtccacacaaactgagggaatgcctgcctctgatcattttcctaaggaacagacttaagtatgccctgactggagatgaagtaaaaaagatttgcatgcagcgattcattaagattgatgggaaagtcaggaccgatataacctaccctgctgggtttatggatgtcatcagcattgacaagactggagagaacttccgtctgatctatgacaccaagggtcgctttgctgtccatcgaattacacctgaggaggccaagtacaagttgtgcaaagtgagaaagatctttgtgggcacaaaaggaatcccacatctggtgacccatgatgcccgtactattcgataccctgatcccctcatcaaggtgaatgacaccattcagattgatttggaaacaggcaagataactgatttcatcaagttcgacactgggaacctgtgtatggtgactggaggtgctaacttggggagaattggtgtaatcaccaatagggagagacatcctggctcttttgatgtggttcatgtgaaagatgccaacggcaacagctttgccactcgtctttccaacatttttgttattggcaagggcaacaaaccgtggatttctcttccccgaggaaaaggaatccgccttaccattgctgaagagagagacaagaggctagcagccaaacagagcagtgggtgaaatggtctctaggagacatgctggaggagtatttgtacctcaacacaacaagcctttctaagcaacatgctagattaaacagcatgatgaaatc

SEQ ID NO: 1237 - DNA, 817 bp, Rattus norvegicus
  Genbank Accession No. X51536
agcggcgccgggcagaagatggcggtgcagatttccaagaagaggaagtttgtagctgatggcatcttcaaagctgaactgaatgagtttctcactcgggagctggctgaagatggctactctggagttgaagtccgagttacgccgaccagaacagaaatcattattttagccaccagaacacagaatgttcttggggagaagggtcgtcggatcagagagctgactgcagttgtccagaagcggtttggcttccctgaaggcagcgtagagctgtatgcagaaaaagtggccacaagaggtctgtgtgccattgcccaggcagagtctctacgctacaaactcttaggagggcttgcagttcgaagggcctgctatggtgtgcttcggttcattatggaaagtggggccaagggctgtgaggttgtggtctctgggaagctccgaggacagagggccaagtccatgaagtttgtggatggtctgatgattcacagcggagaccctgttaactactatgttgacactgctgtgcgccatgtgctcctcagacagggcgtgctgggcatcaaagtgaagatcatgctgccctgggacccaagtggtaagattggtcccaagaagcctctgcctgatcatgtgagcattgtggaacctaaagatgaaatcttgcccaccacccccatctcagaacagaagggtgggaagccagagccacccgccatgcctcagccagtgcctacagcataacagggtcttggcagctgcatctggaggctggatgttgtcttgtaaagacgtttaataaaatcttgaa

SEQ ID NO: 1238 - DNA, 2376 bp, Rattus norvegicus
  Genbank Accession No. X51615
cgcggccgtccgctctcccaactcgcagccagtcggcgcgtcccgcctactgagcgcagcctccaccaggatccgcggggaccagctcgggatcagccggcgacccacttctgaccaacccaggagcggcccgatacccactcccgaccaacccgcgaccgacccagggacccactccggacctgctccttacaggggacagcgcctcgccgcttcccgccgcccagcgcccgcacgctcctcgggacacagtgccaaccatccagaggacaagatggattggggcacactacagagcatcctcgggggtgtcaacaagcactccaccagcattgggaaaatctggctcactgtcctcttcatcttccgcatcatgatcctcgtggtggccgcgaaggaggtgtggggagatgagcaagccgattttgtttgcaacactctccagcctggctgtaagaatgtgtgctacgaccactacttccccatctctcacatccggctctgggctctgcagctgatcatggtgtccacgccggccctcctggtagctatgcacgtggcctaccggagacacgaaaagaaacggaagttcatgaagggagagataaagaacgagtttaaggacatcgaagagatcaaaacccagaaggtccgtatcgaagggtccctgtggtggacctacaccaccagcatcttcttccgggtcatcttcgaagctgtcttcatgtatgtcttttacatcatgtacaatggcttcttcatgcagcgtctggtgaagtgtaacgcctggccttgtcccaatacagtggactgcttcatttccaggcccacagaaaagactgtcttcacggtgttcatgatctctgtgtctggaatttgcatcctgctaaacatcacagagctgtgctatctgttcattaggtattgctcagggaagtccaaaagaccagtctaatgcattgcctggctgttaagcaaagatgagggagaggatgaggcaacctgtgcttagttatcagagttcagctaccagcatctcccgggcaaacattcccaccttaaatgccgccatttgaagtcccccgcaggcctcccatgaaactccagaagcctccatgggcctcccttcccccaaagctcccaaacaaaggcccaattctatgcctgtattaatgggttctaaagttagttagaccccgtgctggtgtgactatgctttaggatacattcacagtttaaacaaagggatctcacattgtttctcttcctctgaggacaggagacatgagcccagtcctgaggaaggtacagagaaagttccttcttccgggtccccttccccaagttgcccccagttaagggtaaagaatcttcgttctgttattttctttcatagtttaagtttgcaacaatggacaaaagctatttaatgttcaagctagctgtgtccttttttttttttttaaatgaaaaccttaaaatgataggttcttttgttcttaaaatgatctggaaagcattatacattcctcctatttcagaggttcggtttgtgatgtgagcatggtgtataaccagatctcacaaggtctttaaaacgttggccttttggttatgggaaacctgggctgtggctgagagcccacctactgtattcatccttaggtgtgctgagtacagcccgcaacaacgttacagcctgtctcaaatgagacaaactggaagcttctcgtgttagcttctgacaagaagaggccttgattaaaattttcaaccgtaattttgtgtaagaggcagataggttatgcctacaactgccccctgccatgagcctaactcagcccccctccacccccagctcgtctactctgtagctgtgggatgtggcagtcagtatcaaaagacttcatgagtttgcttgggaatttcactgccatggtacaatttaatggtgcagaaacaagatggggtggttttcaaagaaccgatgaaacttctagactctaaatcctgttgattaaaactgagtttttctactttgaatgtctgtttgcctcccttttcagcattgccttctaaactggaaacagaaatgttgatatttggaaaaaatagaagaaactagtttaggtcaatgtgtaacttttctaggacaagttgaaccttagcattgtcattctgcctgatgtgttgtccacaagatgacagtcaacaaatccaacaggggacacttcttcctgccaagaatgtcgttgggaagccattctgtaacaataaataagagttgtggtttaaagtctacactattttacctaatgaagaacttattgctgatgttcagaaattcgacattgaaaggtgttttgccaatacggg

SEQ ID NO: 1239 - DNA, 664 bp, Rattus norvegicus
  Genbank Accession No. X53504
ctttcggttcggaggaggcaacggtgcaactttcttcggtcgtcccgaatccgggttcatccgacaccagccacctccaccatgccgcccaagttcgaccccaacgagatcaaagtcgtgtacttgaggtgcaccggaggcgaggtcggcgccacatccgccttggcccctaagatcggtcctctgggtctgtctcccaaaaaagttggtgatgacatcgccaaggctaccggtgactggaaaggcctcaggattacagtgaaactgaccatccagaacagacaggcccagattgaggtggtgccctctgcctctgccctgatcatcaaagccctcaaggagccaccaagagacaggaagaagcagaaaaacattaaacacaatggaaacatcacttttgatgagattgtcaacattgcccggcagatgagacaccggtctttggccagagaactttctggaactatcaaggagatcctgggtactgcacagtctgtgggctgcaatgtggacggccgccaccctcatgacatcatagatgacatcaacagtggtgcggtggagtgcccagctagttaagaagcaacgagaaggggttgggaatttagctcagtggtagagcgcttgccaagcccaaggccctgggttcagtccccagctccgg

SEQ ID NO: 1240 - DNA, 6335 bp, Rattus norvegicus
  Genbank Accession No. X53581
ggatcccggcccgcagcagctctctgctcccagaacccgtgagaaagagacctcaccgcctggtcaggtgggcactcctgaggctgcagagcggaagagaccaccaacactgcccacccctgcccacatccctggcccaagaggaaactgtataaggcctctgggttccgtgggggagggcccaggagcgtcaggacccctgcctgagacaccgccggaacctgagggaaacagaccggataaacagttctctgcacccaaatcccatgggagggagagctgaaccttcagagaggcagacaagccttggaaaccagaagagactgctctctgtacatacatctcggacgccagaggaaaacaccaaaggccatctggaaccctggtgcactgaagctcctggaaggggcggcacaggtcttcctggttgctgccgccacagagagcccttgggcagcaccccgcctggtgaactcaagacacaggcccacaggaacagctgaagacctgcagagaggaaaaactacacgcccgaaagcagaacactctgtccccataacggactgaaagagaggaaaacaggtctacagcactcctgacacacaggcttataggacagtctaaccactgtcagaaatagcagaacaaagtaacactagagataatctgatggtgagaggcaagcgcaggaacccaagcaacagaaaccaagactacatggcatcatcggagcccaattctcccaccaaaacaaacatggaatatccaaacacaccagaaaagcaagatctagtttcaaaatcatatttgatcatgatgctggaggacttcaagaaagacgtgaagaactcccttagagaacaagtagaagcctacagagaggaatcgcaaaaatccctgaaagaattccaggaaaacacaatcaaacagttgaaggaattaaaaatggaaatagaagcaatcaagaaagaacacatggaaacaaccctggatatagaaaaccaaaggaagagacaaggagccgtagatacaagcatcaccaacagaatacaagagatggaagagagaatctcaagagcagaagattccatagaaatcattgactcaactgtcaaagataatgtaaagcggaaaaagctactggtccaaaacatacaggaaatccaggactcaatgagaagatcaaacctaaggataataggtatagaagagagtgaagactcccagctcaaaggaccagtaaatgtcttcaacaaaatcatagaagaaaacttccctaacctaaaaaaagagatacccataggcatacaagaagcctacagaactccaaatagattggaccagaaaagaaacacctcccgtcacataatagtcaaaacaccaaacgcacaaaataaagaaagaatattaaaagcagtaagggaaaaaggtcaagtaacatataaaggcagacctatcagaatcacaccagacttctcgccagaaactatgaaggccagaagatcctggacagatgtcatacagaccctaagagaacacaaatgccagcccaggttactgtatcctgcaaaactctcaattaacatagatggagaaaccaagatattccatgacaaaaccaaatttacacaatatctttctacaaatccagcactacaaaggataataaatggtaaagcccaacataaggaggcaagctataccctagaagaagcaagaaactaatcgtcttggcaacaaaacaaagcgaatgaaagcacacaaacataacctcacatccaaatatgaatataacgggaagcaataatcactattccttaatatctctcaacataaatggccttaactccccaataaaaagacatagattaacaaactggatacgcaacgaggaccctgcattctgctgcctacaggaaacacacctcagagacaaagacagacattacctcagagtgaaaggctggaaaacaattttccaagcaaatggtcagaagaagcaagctggagtagccattctaatatcaaataaaatcaatttttaactaaaagtcatcaaaaaagataaggaaggacacttcatattcatcaaaggaaaaatccaccaagatgaactctcaatcctaaatatctatgccccaaatacaagggcacctacatatgtaaaagaaaccttactaaagctcaaaacacacattgcacctcacacaataatagtgggagatttcaacaccccactctcatcaatggacagatcatggaaacagaaattaaacagagatgtagacagactaagagaagtcatgagccaaagggacttaacggatatttatagaacattctatcctaaagcaaaaggatataccttcttctcagctcctcatggtactttctccaaaattgaccatataattggtcaaaaaacgggcctcaacaggtacagaaagatagaaataatcccatgcatgctatcggaccaccacggcctaaaactggtcttcaataacaatcaaggaagaatgcccatatatacttggaaactgaacaatgctctactcaatgataacctggtcaaggaagaaataaagaaagaaattaaaaactttttagaatttaatgaaaatgaaggtacaacatacccaaacttatgggacacaatgaaagctgtgctaagaggaaaactcatagcgctgagtgcctgcagaaagaaacaggaaagagcatatgtcagcagcttgacagcacacctaaaagctctagaacaaaaagaagcaaatacacccaggaggagtagaaggcaggaaataatcaaactcagagctgaaatcaaccaagtagaaacaaaaggaccatagaaagaatcaacagaaccaaaagttggttctttgagaaaatcaacaagatagataaacccttagccagactaatgagaggacacagagagtgtgtccaaattaacaaaatcagaaatgaaaagggagacataacaacagattcagaggaaattcaaaaaatcatcagatcttactataaaaacctatattcaacaaaacttgaaaatcttcaggaaatggacaattttctagacagataccaggtaccgaagttaaatcaggaacagataaaccagttaaacaaccccataactcctaaggaaatagaagcagtcattaaaggtctcccaaccaaaaagagcccaggtccagacgggtttagtgcagaattctatcaaaccttcatagaagacctcataccaatattatccaaactattccacaaaattgaaacagatggatcactaccgaataccttctacgaagccacaattactcttatacctaaaccacacaaagacacaacaaagaaagagaacttcagaccaatttcccttatgaatatcgacgcaaaaatactcaacaaaattctggcaaaccgaatccaagagcacatcaaaacaatcatccaccatgaccaagtaggcttcatcccaggcatgcagggatggtttaatatacggaaaaccatcaacgtgatccattatataaacaaactgaaagaacaaaaccacatgatcatttcattagacgctgagaaagcatttgacaaaattcaacaccccttcatgataaaagtcctggaaagaattggaattcaaggcccatacctgaacatagtaaaagccatatacagcaaaccagttgctaacattaaactaaatggagagaaacttgaagcaatcccactaaaatcagggactagacaaggctgcccactctctccctacttattcaatatagttcttgaagttctggccagagcaatcagacaacaaaaggaggtcaaggggatacagatcggaaaagaagaagtcaaaatatcactatttgcagatgatatgatagtatatttaagtgatcccaaacattccaccagagaactactaaagctgatagacaacttcagcaaagtggctaggtataaaattaactcaaataaatcagttgccttcctctatacaaaagagaaacaagccgagaaagaaattagggaaacgacacccttcataatagacccaaataatataaagtacctcggtgtgactttaacaaagcaagtaaaagatctgtacaataagaacttcaagacactgaagaaggaaattgaagaagacctcagaagatggaaagatctcccgtgctcatggattggcaggattaatatagtaaaaatggccattttaccaaaagcaatctacagattcaatgcaatccccatcaaaataccaatccaattcttcaaagagttagacagaacaatttgcaaattcatctggaataacaaaaaacccaggatagctaaagctatcctcaacaataaaaggacttcagggggaatcactatccctgaactcaagcagtattacagagcaatagtgataaaaactgcatggtattggtacagagacagacagatagaccaatggaatagaattgaagacccagaaatgaacccacacacctatggtcacttgatttttgacaaaggagccaaaaccatcaaatggaaaaaagatagcattttcagcaaatggtgctagttcaactggaggtcaacatgtagaagaatgaagatcgatccatgcttgtcaccctgtacaagcttaagtccaagtggatcaaggacctccacatcaaaccagacacactcaaactaatagaagaaaaactagggaagcatctggaacacatgggcactggaaaaaatttcctaaacaaaacaccatggcttacgctctaagatcaagaatcgacaaatgggatctcataaaactgcaaagcttctgtaaggcaaaggacactgtggttaggacaaaacggcaaccaacagattgggaaaatatctttaccaatcctacaacagatagaggccttatatccaaaatatacaaagaactcaagaagttagaccgcagggaaacaaataaccctattaaaaaatggggttcagagctaaacaaagaattcacagctgaggaatgccaaatggctgagaaacacctaaagaaatgttcaacatctttagtcataagggaaatgcaaatcaaaacaaccgtgagatttcacctcacaccagtgagaatggctatgatcaaaaactcaggggacaacagatgctggcgaggatgtggagaaagaggaacactcctccattgttggtgggattgcaaactggtacaaccattctggaaatcagtctggaggttcctcagaaaattggacattgaactgcctgaggatccagctatacctctcttgggcatatacccaaaagatgccccaacatataaaaaagacacgtgctccactatgttcattgcagccttatttataatagccagaagctggaaagaacccagatgcccttcaacagaggaatggatacagaaaatgtggtacatctacacaatggaatattactcagctatcaaaaacaacgagtttatgaaattcgtaggcaaatggttggaactggaaaatatcatcctgagtaagctaacccaatcacagaaagacatacatggtatgcactcattgataagtggctattagcccaaatgcttgaattaccctagatacctagaacaaatgaaactcaagacggatgatcaaaatgtgaatgcttcactccttctttaaaaggggaacaagaatacccttggcagggaagagagaggcaaagattaaaacagagaatgaaggaacacccattcagagcctgccccacatgtggcccatacatatacagccacccaattagacaagatggatgaagcaaagaagtgcagaccgacaggagccggatgtagatcgctcctgagagacacagccagaatacagcaaatacagaggcgaatgccagcagcaaaccactgaactgagaataggacccccgttgaaggaatcagagaaagaactggaagatcttgaaggggctcgagaccccatatgtacaacaatgctaagcaaccagagcttccagggactaagccactacctaaagactatacatggactgaccctggactctgacctcataggtagcaatgaatatcctagtaagagcaccagtggaaggagaagccctgggtcctgctaagactgaacccccagtgaactagactggtggggggagggcggcaatggggggagggttgggaggggaacaccataaggaaggggaggggggagggggatgtttgcccggataccgaaagggaataacatcgaaatgtatataagaatactcaagttaataaaaaaaaaaaaaaaaaaaga

SEQ ID NO: 1241 - DNA, 1934 bp, Rattus norvegicus
  Genbank Accession No. X54467
cctataagccggcgacctctggcattaagctttgctctcttcgggccgtcgcgaccatgcagacccccggcgtcttgctgctcattctcggcctcctggatgcgtcctcctccgcgcttatcagaatccccctgcgcaagttcacatccatccgtcggactatgacggaagtgggaggctctgtggaagacctgatccttaaaggtcccataaccaagtactccatgcagtcatctcctaggaccaaggagccagtgtcagagttactaaaaaactacctggatgcccagtactatggtgagatcggcattgggactcccccacagtgtttcacagtcgtctttgacactggctcctctaacctgtgggtcccctccattcattgcaagctgctggacatagcctgctgggtccaccacaagtacaacagtgacaagtccagcacctatgtgaagaatggcacatccttcgacatccactacggctcaggtagcctctctgggtacctgagccaggacactgtgtcggttccatgtaagtcagacttaggaggtatcaaggtggagaaacagatctttggggaagccaccaagcagcctggagtcgtattcatcgcagccaagtttgatggcatcttgggcatgggctacccttttatctctgttaacaaggtgctcccggtcttcgacaacctgatgaaacagaagctggtggaaaagaacatcttctccttctacctgaacagggacccaaccgggcaacctggaggagaactaatgcttggcggcactgactccagatactaccacggggagctgtcctacctgaacgtcacccgaaaggcctactggcaggtgcacatggaccagctggaggtgggcagcgagctgaccctgtgcaagggaggctgtgaggctattgtggacacagggacgtctcttctggtggggcctgtggacgaggtgaaggaactacagaaggccattggggcagtgcctctcatccagggcgagtatatgatcccttgtgagaaggtgtccagcctgcccattatcacctttaagctaggaggccaaaactatgaactacacccagagaagtacatactcaaggtatcgcaggctggaaagacgatctgcctgagtggcttcatggggatggacataccccctcccagtgggccgctctggatcctgggcgatgtctttattggctgctactacaccgtgtttgacagagaatacaatagggtcggctttgccaaggctgccacactctaacttgctccttcttcactgtcagggaactggatcagagtccagtagagaaagccagccagccccatccctccacctgccccactcacacatattcacactcgcctagtgttgctgggcccttgggaggcctggctggagctggtccagctgttctgttctgtggtccctgtccctgggttcagattgctgccctccgcctgtctgaaggaggccaaggcctacccagtacaaaaggctgcctttaaaggcccctactggcttggtagctgccgggatgaattgtcttgtcctgctgccctttgctgcgtgggcagcactctgaagcaggcaaatgggtcttgggatccctcccagaaacctgctctgaccagaccctcaggcagcctggggatggcaccaagctctactgccccactatctctggcctggcaaaggctgaaggtgagcagaaggagcaagaggacagaagcaaaactatatgaacctggggggggttacctgggacctgaccccaccctcctgggaaggcatgcttcagcctggggcagaggtaggatggctgactggttttggctggcctctgctgccctcatcctgggctagtcagatgggagccaaagttgatatacaaataaagttgttttgggcctcttt

SEQ ID NO: 1242 - DNA, 999 bp, Rattus norvegicus
  Genbank Accession No. X56228
catcaggtgctctaccgagcgctggtctccaccaagtggctggcggaatccattcggtccggcaaggtggggccaagccttcgggtgctggacgcgtcatggtactcaccagggacccgccaggcacgcaaagagtaccaggagcgacacgtgcctggcgcgtccttctttgatatagaggagtgccgggacacgacttcgccttacgagatgatgctgcccagtgaggcccactttggggactacgtgggcaacctgggcataagcaacgacacacacgtcgtggtatacgatggagacgacctgggcagcttctatgcacccagagtatggtggatgtttcgtgtgtttggccaccgcacagtatcagtgctcaatggtggcttccggaactggctgaaggagggccacccggtgacatctgaaccctcgcggccagagccagccgttttcaaagccacactgaaccgctccctgctcaagacctatgagcaggtcctggagaacctccagtctaaaaggttccagctggtggattctcgggcccagggacggtacctgggcacacaaccggagcccgatgcagtaggactggactcaggccacatccgtggctctgtcaacgtgcccttcatgaacttcctgacagaagatggcttcgagaagagcccagaggagctgcgtgccatattccaggacaagaaggtggacctctcccagccccttatcgccacatgccgcaaaggggtcactgcttgccacattgccctggctgcctacctttgtggcaagcccgatgtggctgtttacgatggctcctggtcagagtggtttcgcagggcccccccggagacccgtgtgtcccaggggaagagtgggaaggcctgagtgtgtgcagcctcctcttccgcccaccagatccagccagttcccttcagtcaggcttgtatgacctgctgaaggttcgcctcttacgcaatggagattgacaggatttta

SEQ ID NO: 1243 - DNA, 628 bp, Rattus norvegicus
  Genbank Accession No. X58389
cctgttagcggccagaggtaacctgtgaagatggttcgctactcccttgacccagaaaaccccacgaaatcatgcaagtcaagaggctcaaaccttcgtgttcactttaagaacacccgggaaactgcccaggccatcaagggtatgcatatccgcaaagccaccaagtatctgaaggatgtcactttaaagaagcagtgtgtgccattccggcggtataatggtggagtcggtaggtgcgcccaggccaaacagtggggctggacacagggacggtggccaaaaaagagtgctgaatttttgctgcacatgcttaaaaatgcagagagtaatgctgaacttaagggtttggatgtagactctctggtcattgaacacatccaggtgaacaaggctcctaagatgcgcagacgaacctacagagctcacggccggattaacccatacatgagctccccctgccacatcgagatgatcctcactgagaaggaacagattgttccaaagccagaagaggaggttgcacagaagaaaaagatatcccagaagaaattgaagaaacaaaagctcatggcacgggaataaattcagcataaataaatgcggataaagtaaaaaaaaaaaaaaa

SEQ ID NO: 1244 - DNA, 744 bp, Rattus norvegicus
  Genbank Accession No. X58465
ctcttcctgtctgtgccagaactgcgcgtggtccgcgccgatcgactgagaagcccggtttgcgctctcagaatgactgaatgggaaacagccacacccgcggtggcagagaccccggacatcaagctctttgggaaatggagcactgatgatgtgcagatcaacgatatttctctacaggattacattgctgtgaaggagaagtatgccaagtacctgccccacagtgcaggacggtatgctgccaacggtttccgcaaagcacagtgtcccatcgtggagcgccttactaactccatgatgatgcacggtcgtaacaacggcaagaagctcatgactgtacgaattgtcaagcatgcctttgagatcatccacctgctcactggtgagaaccctctgcaggtcctggtgaatgctatcatcaacagtggcccccgagaagactcaacacgcattgggcgggctggaacagtgagacggcaggctgtggatgtatccccacttcgccgagtgaatcaggccatctggctgctgtgcacgggggctcgtgaggctgctttccggaacatcaagaccatcgctgagtgccttgcagatgagctcattaatgctcgcaagggctcctccaactcctatgctatcaagaagaaagatgaactggagcgtgtggccaagtctaaccgctgatttcccagctgctgcctaataaattgtgtgccctttgggacagttacatcaaaaaaa

SEQ ID NO: 1245 - DNA, 497 bp, Rattus norvegicus
  Genbank Accession No. X59375
aaagttgctgctaggcgctcgaaagcgagcacctcatctcagagatctggagcggccgcgcttgcggagctgtcaccatgcctctggctagagatctattacacccttccttggaagaggaaaagaaaaaacataagaagaaacggctggttcagagcccaaattcttacttcatggatgtgaaatgtccaggttgctacaagattactacagttttcagccatgctcagacagtggttctttgtgtgggttgttcaaccgtgctgtgccagcccacaggagggaaagccaggctcacagaaggctgttcatttagaagaaagcaacactaatcatctatacaagttcctgaattcgtgtttttcacagaaagccttatcaactttagttactctaccaagacaatgtaattattgtttgattttataaagtctacaacaatgatctcctattttggtgtcagtttttcaataaagttttacttatgaacaagttca

SEQ ID NO: 1246 - DNA, 1547 bp, Rattus norvegicus
  Genbank Accession No. X59859
gcacaagtttcctgggctggaccatttgagcagagaggattatttgacttcatgctagaagatgaggcctctggcataatcccttacgaccctgacaatcccctgatatctatgtgcccctaccgatgccaatgccatctccgagtggtgcagtgttctgatctgggtctggacaaagtaccctgggaatttccacctgacacaacattgctagacctgcaaaacaacaaaataacagagatcaaagagggggcctttaagaacctgaaggacttgcataccttgatccttgtcaacaacaagatcagcaagatcagcccagaggcatttaaacctctagtgaagttggaaaggctttatctgtctaagaaccacctaaaggagctgcccgaaaaattgcccaaaacactccaggagcttcgactccacgacaatgagatcaccaaactgaagaaatctgtgttcaatggactgaaccgtatgattgtcatagaactgggcggcaacccactgaaaaactctgggattgaaaatggagccttgcagggaatgaagggtctcggatacatccgcatctcagacaccaacataactgctattcctcaaggtctgcccacttctatcagtgaactgcatctggatggcaacaagatagccaaagttgatgcagccagcctgaaaggaatgtctaatttgtctaagctgggtttgagcttcaatagcatcaccgttgtggaaaatggcagtctggctaatgttcctcatctgagggagctccacttggacaacaacaaactcctcagagtgcctgctgggctggcacagcataaatatgtccaggtcgtctaccttcataacaacaacatctccgaagttgggcagcatgacttctgcctcccttcataccagactaggaagacttcctacactgccgtgagtctttatagcaaccctgtccggtattggcaaattcacccacacaccttcagatgtgtcttcgggcgctctaccattcaacttgggaactacaagtaactcccaaacagcctcatttttataatcgggaacaaaaaaaccaatctgtcaatattattgctaaaaagaaaaaaatattttgaaaaagaaagaatgctagattctggaaattcaagtatagcgcggatgcctttcccgtatgacttatcatgcatcaagccaaatatacagattgaataattacctacaataaaaatattttatctgtagtattcagaatcacttttaaaattttctgtagatgtgaactgaggtatcgaagtctgatgtaatcatagatgtcaacatttaataaagctaaaaggaacagaatacaaagtcttctgtaattcatagagctaaattgactcttttgacataaagtcaaatgtagaactctagcaatgtattaatctcctttattattggtaaagtcttatttgaatatctaagttcaacatgggctatgtaaaattttcactgtcatactgaaaaacaataaaatttaaaaaatgcattcaaaaaaaaaaaaa

SEQ ID NO: 1247 - DNA, 498 bp, Rattus norvegicus
  Genbank Accession No. X61381
tgtgtgcgatcgcggtggatcgctaccatgaaccacacttctcaagccttcgtgaacgctgccactgggggacaacccccaaactacgaaagaatcaaggaagaatatgaggtgtctgaactgggggctccccacggatcggcttctgtcagaactaccgtgatcaacatgcccagagaggtctctgtgcctgaccatgtggtctggtccctgttcaatacgctcttcatgaacttctgctgcctgggcttcattgcctatgcctactctgtgaagtctagggatcggaagatggtgggtgatatgactggagcccaggcctacgcatccactgccaaatgcctgaacatcagctccctggtcctcagcatcctcatggtcattatcactattgttactgtcgtcatcattgctcttaatgctcctcgtctccagacttgatagaggattctggtttctgatcctgacgtgcttcacgctctgctggctgcccttttt

SEQ ID NO: 1248 - DNA, 843 bp, Rattus norvegicus
  Genbank Accession No. X62145
ctcttttggccttgcttgccggcagactcgccgccatgggccgtgtgatccgaggccagaggaaaggtgccggttctgtgtttcgtgcgcacgtgaagcaccgtaagggagccgcgcgtctgcgtgctgtggacttcgcggagcgacacggctacattaaaggcatcgtaaaggacatcattcatgaccctggccgcggcgctcccctcgcgaaagtagtctttcgtgatccctatcgattcaagaagcggacagagctgttcattgccgcagagggaatccacactggacagtttgtgtactgcggcaagaaggcccagctgaatattggcaatgttttgcccgtgggcaccatgcctgagggtactatcgtgtgttgtctggaggagaagcctggggacaggggcaagctggcacgagcctccgggaactatgctacagtcatctcccacaacccagagaccaagaagacccgagtgaagctgccttcagggtccaagaaggtcatttcctctgctaaccgagctgttgttggtgtcgtggctggcgggggcagaattgacaagcctatcttaaaggctggccgtgcctaccataagtacaaggcaaagaggaactgctggccacgtgtgcggggtgttgccatgaatcctgtggagcatccctttggcggtggtaaccaccagcacattggcaagccttccactatccgaagagatgccccagctgggcgcaaagtgggtctcattgctgctcgccggactggacggctacgtggaaccaaaactgtacaggagaaggagaactagagttcaggagctaataaagtatgtgctttggcta

SEQ ID NO: 1249 - DNA, 585 bp, Rattus norvegicus
  Genbank Accession No. X62146
tcttcctgttctccaccatggcgcaagatcagggtgaaaaggagaaccccatgcgggaacttcgtatccgcaagctctgcctcaatatctgcgtgggggagagtggagacagactgacccgagcagccaaggtgttggagcagctcacaggccagacccctgtgttttccaaagctagatacaccgtcaggtcctttggcatccggcgaaatgagaaaatcgctgttcactgcactgtccgtggagccaaggcagaggagattctggagaaaggcctgaaggtgcgagagtacgaattacggaagaataacttctcagataccggcaactttggctttgggattcaggaacacattgacctaggcatcaaatatgacccaagcattggcatctatggcctggatttctatgtggtgctgggtaggccaggtttcagcatcgcagacaagaagcgcagaacaggctgcattggggccaaacacagaatcagcaaagaggaggcaatgcgctggttccagcagaagtatgatggcatcatccttcctggcaaataaactttatccaaaggccaataaagttttctca

SEQ ID NO: 1250 - DNA, 1316 bp, Rattus norvegicus
  Genbank Accession No. X62166
cgagacatatcggcggcgtgtggcggcgagatgtctcacaggaaattctcagctcctaggcatgggtccttgggcttcttgcctcggaagcgcagcagccggcatcgtggaaaagtgaagagcttccctaaggatgacccttccaagcctgttcacctcacagccttcctagggtacaaggctggcatgacccacattgtccgggaagttgaccggccaggatctaaggtgaataagaaagaagttgtggaggctgtgaccattgtggaaaccccacccatggtggttgtgggtattgtgggatatgtagaaaccccacgaggcctccggaccttcaagactgtatttgctgagcacatcagcgatgagtgtaaaaggcgtttctataagaattggcacaaatctaagaagaaggcttttaccaagtactgtaagaaatggcaagatgacacaggcaagaagcagctggagaaggacttcaacagcatgaagaagtactgccaggtcatccgcataattgctcacactcagatgcgcctgcttcctctgcgccagaagaaggcacacttgatggagatccaggtgaatgggggcactgtagctgagaagctagactgggcccgagagaggctggagcagcaggtccctgtgaaccaggtgtttgggcaagatgagatgattgacgtcatcggcgtgacaaagggcaaaggctacaaaggggtgaccagtcgttggcatacaaagaagctgccccgaaagacccacagaggtctgcgcaaagttgcttgtattggagcttggcatcctgcccgtgtagccttctctgtggctcgagctgggcagaaaggctaccatcaccgaacagagatcaacaagaagatttacaagattggtcaaggctacctcatcaaggatggtaagctgatcaagaacaatgcatctactgactacgacctgtctgacaagagcatcaacccactgggtggctttgtccattatggtgaggtgaccaatgacttcatcatgctcaaaggctgtgtggtgggaaccaagaagcgagtgcttactctccggaagtccttgctggtccagaccaagcgtcgggctcttgagaagattgacctgaagttcattgacaccacctccaaattcggacatggtcgcttccagaccatggaggaaaagaaagcattcatgggaccgctcaagaaagatcgcattgccaaggaggaaggtgcctgatgccaggagtactttgtgcagctggtggggtctcatcaataaaatattttcaattaaaaaaaaaaaaaaaaaaa

SEQ ID NO: 1251 - DNA, 785 bp, Rattus norvegicus
  Genbank Accession No. X62875
gccccgatggctgacctggcggcagcagtgtggtcagtgcaggggaagcttaggtcccagcatgtatgtcccccatcaagcgtcaccgggtgggtttctcagtccctcctgccccaccctactgagaatcctgcaccaggttggctgagccccttggctggacaacaggaagtaggatggtgttggctccacccactttgctgctcttccctgggacaagacagatgggcgctaccacccatctcgagtgaggtcctgagcacttccacctaaggcagacggggctccaacaggcgcctcccccactacactcttcctctagcagggcaccaaggagctcgccttgcccccctctccttttgctcctccctgcccccaaggttctggttccactttttcctctgttcacaaactacctctggacagttgtgttgtgttttttgttcaaatgttcattcttagacacccaccattgctgctaccagcgccagatgtccatcctcccgattttgcctgtaccccccacacaatacactctaggggaagggggggctggtgtgcagcagcaggctggttaccgagtaccccacgctagggaagatggccccgccccgtggatgctgcagcagagtgaggagggggggcccacttggatgggaaaagggtataggaccacctccccttgttgtgggggaggggtggccagtatttgtcccagcctggggctccccctctggtttcctatttgcagttacttgaataaaaaaaaatagccttttctggac

SEQ ID NO: 1252 - DNA, 1454 bp, Rattus norvegicus
  Genbank Accession No. X75207
ccgtcgacggccattaccaatcgcgaaaccggcgcagtagcagagagctgcagactccgcgcgctccggagaccggtcgtagagcgcgaggcagcgtcagcagcagacaccggagcccaacccggaccacagccctccccaggcggccgcgcatggaacaccagctcctgtgctgcgaagtggagaccatccgccgcgcgtaccctgacaccaatctcctcaacgaccgggtgctgcgagccatgcttaagactgaggagacctgcgcgccctccgtttcttacttcaagtgcgtgcagagggagattgtgccatccatgcggaaaatcgtggccacctggatgctagaggtctgcgaggagcagaagtgcgaagaggaggtcttcccgctggccatgaactacctggaccggttcttgtctctggagcccctgaagaagagccgcctgcagcttctgggggccacctgcatgttcgtggcctctaagatgaaggagaccattcccctgactgccgagaagttgtgcatctacactgacaactctatccgccccgaggagttgctgcaaatggaactgcttctggtgaacaagctcaaatggaacctggccgccatgactccccacgatttcatcgaacacttcctctccaaaatgccagaggcggatgagaacaagcagatcatccgcaaacatgcacagacctttgtggccctctgtgccacagatgtgaagttcatttccaacccaccctccatggtggctgctgggagtgtggtggccgcgatgcagggcctgaacctgggcagccccaacaacttcctctcctgctaccgcacaacgcactttctttccagagtcatcaagtgtgacccggactgcctccgtgcctgccaggaacagattgaagcccttctggagtcaagcctgcgccaggcccagcagaacatcgatcccaaggccaccgaggaggaaggggaagtggaggaagaagctggtctggcttgcacacccaccgacgtccgagatgtggacatctgagggccaccggcaggcgggagtcaccaagtagtggcatcgcgaagagaaaggagccagcccgggtgctcctgacgaggtccccttgggatgtgttgttaccagaaggggaagttttgttctctttgttggttgtttttccttaatctttctcctttctatctgatttaagcaaaagagaaaaaaaatacctgaaagctgtcttaaagagagagagagagatagaattcgcatcaccctgagtatagggagacgggggggtgctacaaaaatagaattctgtaccccagtaatcaactagttttctattaatgtgcttgtctgttctaagaataggattaacacacaggaagtcttgagaaggatttttgattcttttatgtgtttaagaaaaaaaagcttaagaaacattgcttt

SEQ ID NO: 1253 - DNA, 443 bp, Rattus norvegicus
  Genbank Accession No. X81448
caagatcatcgaagacctgagggctcagatctttgcgaattctgtggacaatgcccgcatcgtcttgcagatcgacaatgcccgtcttgccgctgatgactttagagtcaagtatgagacggaactggccatgcgccagtctgtggagagtgacattcatggactccgcaaggtggtggatgacaccaacatcacgaggttgcagctggagacagaaatcgaagcgctcaaggaggagctgctgttcatgaagaagaatcatgaggaggaagtccaaggcctggaagctcagattgccagttctgggttgactgtggaagtggatgctcccaaatctcaggacctcagcaagatcatggcggacatccgtgcccagtatgaacagctggctcagaagaaccgtgaggaactggacaagtactggtctcagcagattgaggaga

SEQ ID NO: 1254 - DNA, 1758 bp, Rattus norvegicus
  Genbank Accession No. X96437
gaatagcgtctcgggagtgtccctgggtaatcgctgcatctcgttttgtgtgtgtgctctgtcgaaacgtctgtgatgtgtgtatggttttcacgtgaacggaggcaggcagagttgggtctgtgggttctagtgtgttcttaatctttttggaagtttgtgcagtgacttcccctctgggattgtttcctatgcataccttcaagtatgtgtgaatgtgttttctgtggtcccttgatcttactgggcttctctaaggagggtggctggaccatctgctacgtgtctgggagcccctctctagctaccacatgtcccgacatgtgcttactcccaatatttgcacccactcgcattcacaactcccaggcaaaaagaaaaaatcaaaaaaacaaaaaaaacgtgcactggggcacctagaaaatgggcagccaaggctccgcctacattttgcttcctccttggaatttccagccctgtgcagccaactgctccctagctgcgaagggcggagtttcccggctctataagtagtggtgccttaccggggatccgcactcctccgtaccctctgtacagcgcgcgaattatgtgccattcgcgtaaccacctccacaccatgactggcctgagggctccggcgccagttccctccaccggcccggaactccggcggggctccggtcccggaattttcaccttcgaccccctcccggagcgggcggtagcgtccgccgtgcgtccgaacacttctcgcgggcacggaaaacgcagccgacgggtgctctaccctcgagtggtgagtatcgcccgagtgggcagcaagaggtcgagtcgccccggaacctttgggaacaactagatgcggggactttcgtctgacgtttccctcttttctctgctcaggtccggcgccagctaccaaccgaggaacccaacattgccaagaggatcctctttctcctgctcgccatcatcttctgccagattttgatggctgaagaaggtgtgtcgcaggccctggctccggaggatgctaccagcgccatatcacctgagcccatctctgcgcccattactgcgcctcctgtcctcgagcctttgaacctgacctcggagtcctcggactatgctctggatctcaaagcttttctccagcaacacccggcggcattctaaacgcgatgggtcacagtccggaaaaaaaaacccaaagagcaccaggggtacctggtcggcaagaacgtatcccaaactgggacttataaggcaacgctaactcagaacactaccgccaagatgccggttcttggggcgagcccgaggcaccgtgggtcctggctaggctcactggtgacggacggaggtcttctccgtgtctaattaatatttatgtatttatgtatatcctcctaggtgaaggaggggtgtatgtaatatttattctaacttatgcaggggtgcgagatatgcccccttgctgtgacacagatatttattacgatttatagggtccgtgagacagagttgtgggaggattagtttagtcttggtcggggggcataggtttaggggtaacactccattttccagcacttcgactctgttgtaagactttggcagacccttgggaatacggtctgtgtgcctttgatgtcttcctgactggaagtcttgggtccatggattgtcagagggcggctgtctggggtcgcctagtatgttctgtgaacacgaataaacttgatttgcctgtcg

SEQ ID NO: 1255 - DNA, 1662 bp, Rattus norvegicus
  Genbank Accession No. Y08355
cattcagtttagtcagaatccatgggtgggctcagctgtctcctccgtacctagtctgcggttatggcttcgctcacggtgaaggcctatctactgggcaaggaggaggcggcccgcgagatccgccgcttcagcttctgcttcagcccggagccggaggcggaagccgcggctggcccggggccctgcgagaggctgctgagccgggtggctgtgctgttccccgcgctgcggcctggaggctttcaggcgcactaccgcgatgaggatggggacttggtcgccttctccagtgatgaggaactgacaatggccatgtcctatgtgaaagatgacatcttccgcatctacattaaagagaagaaggagtgccggcgggaacatcgccccccatgtgctcaggaggcacgaagcatggtgcaccccaacgtgatttgtgatggttgcaatgggcctgtggtgggaactcgctataagtgcagtgtgtgccccgactacgacctgtgcagcgtctgcgaggggaagggcctgcacagggagcacagcaagctcatctttcccaacccctttggccacctctctgatagcttctctcatagccgctggcttcggaagctgaaacatgggcactttggctggcctggctgggagatgggcccaccagggaactggagcccacgtcctcctcgcgcaggggatggtcgcccttgccccacagctgagtcggcttctgctccatcagaggatcccaatgtcaatttcctgaagaatgtgggggagagcgtggcagctgccctcagccctctaggcatcgaggttgacattgatgtggaacatggagggaagagaagccgcctgacacccacctctgcagaaagttccagcacaggcacagaagataagagtggtactcagccaagcagctgctcttcggaagtcagcaaacctgacggggccggggagggccctgctcagtctctgacagagcagatgaagaagatagccttggagtcggtgggacagccagaggaactgatggagtcggataactgctcaggaggggatgacgactggacgcatttgtcttctaaagaagtggacccatccacaggtgaactccagtctctacagatgccagaatcggaagggccaagctctctagacccctcacaggaaggccccacagggctgaaggaagctgccctgtacccacatctcccaccagaggctgatccccggctgattgagtcactctctcagatgctgtccatgggtttctcggatgaaggcggctggctcaccaggctcctacagaccaagaattatgacatcggggctgctctggacacgatccagtattcaaagcaccctccaccattgtgacagtgctgtggccaagtcccacaacccacctcccttgtcttctagttgcatcatgtagagtagcagggcttctaaggcccagtgtcttggcattcttctagaaccttcaggtgggactgtgaggccttcttaggcagtaggaaagtgcatgagaagagagtctgagtgtgcacatgctgacccctgagcacagatccaagcagctgtggctgggcttmcgctgctttccctcggcctggcctttgccagggagctgtggagtcatgctgcactccactt

SEQ ID NO: 1256 - DNA, 2597 bp, Rattus norvegicus
  Genbank Accession No. Y09945
gcgaaaaagaacttgttaaatcctttgggctcacataagagcaatttatttttgtgccttcctttggacatagtaattagtcctagatggcctttcaggacctcctgaatcaagttggcagcctggggaggttccagatccttcagatgactttcattttgatcttcaacataataatttctcctcattctctattggagaacttcacagcagtcattcccaatcatcgctgctgggtccccatcctcgacaatgacactgtctctggtaatgacaatgggaacctgagccaagatgacctcctgagggtctctatccccctggactccgatctgagaccagagaagtgtcgtcgctttgtccaaccacagtgggatctccttcatctaaacggtaccttttccagtgtgacagagccagacacagagccctgtgtggatggctgggtgtatgaccaaagcacctttctttccaccattattaccgagtgggacctggtgtgtgaatctcagtcactggattcaatagctaagtttctattcttgactggtatcttagtaggaaatatcctatatggccccttaacagacaggtttgggaggaggttaatccttatatgtgcctcactgcaaatggccgtcactgaaacctgtgcagcttttgctcccacctttctcatctactgctcactacgattcctggcagggatttccttctcaaccgttttgaccaatagtgccttgctcattatagaatggacaaggcctaaattccaagccttggcaacaggactgctattatgtgctggagcaattggacagacagtattggcaggcctggcttttactgtgcgaaactggcaccacctccatctggcaatgtctgtaccaatatttttcttacttgtacccacaaggtggctgtcagagtcagcgcggtggctgattatgaccaacaaactccagaagggcttaaaagaacttataaaagttgcacacataaatggaatgaagaattcaacagatgtcctaaccattgaggttgtgagaacaatcatgaaggaggagctggaggcctcacagacaaaatcttccctgtgggacttgttccgtacacctaacttgcgtaagcggatatgccttctgtcccttgtgagatttgtggtatggttatctgtgattggtttactgatcaacttccagcacctaaggatcaatgtcttcctattgcagtgtcttcttggtataatcaccattccagccaatttagttggaatttttttggtgaatcacttgggtcgcagaataagtcaactatttatcatatccctgtttggaatttccattttggccataatatttgtgcctcaagaaatgcagatcctgcgcatggttttggcaacttttggaggagtattttcttttgtctctgttagcagtgctcttgtgcatgcaaatgagctacttcccactataatcagggcaactgctttaggagtcattggaattgctggtagtactggggcagccctgtctcctctgtttatgatccttaggacatactctgactccttgccctggatcatctatggagtcctttccttccttggtggccttgttgtccttctcctccctgagaccaagaatcagcctctgcctgactccatacaggatgtggaaaatgaaggaagagcctccagacaaggaaagcagaatgatactctcatcaaagtgacacagttttaagagactccaagagctgaaatctgataaaggagcaagataagaaaactgtcactcagatttatgatggcccaggttcactctagatacagcaaaattccttatcaagtaacgatatagcaaaaattttgtattacatttaaaatttccacattcaactgatacttaaattatctcaataacaaaattaaaggaaaacaacacagtgaaataaatcttcagagttttaatagacacttatgaagtttccacaaaggatgtggatgaaccttcttcccattattgtgacataatgcttgggaaaattaaaaatggataatttattgtgaaattcccattagtttcatcccactgctgttgcgataatctcctgtgtactatgtagatgaccgtctttgtattattcaagtgctgatctcagtatcagcagagatttaagtatagctggactttggtattattatttttatgaagcatcaccagtctcagtattctgtaaacatcttctctatcaccttctgattggtataataaaaaggcgaatggcctatgccagggcaggagaggaaaggtagatatttcatttgttgagagatagaaactctgggaaagagttgatgatgaaattgatcagcgaaatgtgctagaagcctcagaattttgtaaaaaacaccatgttaacagtaaagatttgaagaaagatttttctaacaagcccaagttctgggcaacaagcccagaaaattataaggaaatgtcctacttgttctttgtataacctaacaccatcacttgcagaaagtaacccaaagatacccaaagaaataaaattttacaagtgtaaaaagagagaga

SEQ ID NO: 1257 - DNA, 342 bp, Rattus norvegicus
  Genbank Accession No. Y13336
atgtcggcgtcggtagtgtccgtcatctcccggttcctggaggagtacttgagctccactccacagcggctgaagttgctggatgcctatctcctttatatattgctgaccggggcgctgcagttcggctactgtctcctcgtgggcaccttccccttcaactctttcctctctggcttcatctcttgtgtgggcagcttcatcttagcggtttgcttgagaatacagatcaacccccagaacaaggcggatttccaaggcatctctcctgagcgagcctttgctgattttctctttgccagcactatcctgcacctcgtcgtcatgaactttgttggctga

SEQ ID NO: 1258 - DNA, 1632 bp, Rattus norvegicus
  Genbank Accession No. Y15068
atggagcaggtgaatgagctaaaggagaagggcaataaggccctgagtgctgggaacattgatgatgccttacagtgctactctgaggcaattaaactagatcctcagaaccatgtgctctatagcaatcgctctgcagcctatgccaagaaaggagactaccagaaggcgtatgaggacggttgcaagactgttgacctgaagcctgactggggcaagggttattcaagaaaagcagcagcccttgagttcctaaaccggtttgaagaagccaaacgaacctatgaagaaggtttaaaacatgaagccaataatctacagcttaaggaaggcttgcagaacatggaggccaggttggcagagaggaaatttatgaatcctttcaacttgcctaatctgtaccagaagttagagaatgatcccaggacaaggacactgctcagtgaccccacctacagggaactcatagagcaactacagaacaagccttcagacctgggcacgaaactccaagatccccgggtcatgactactctcagtgtcctccttggagttgatctgggcagtatggatgaagaggaagaggcagcaacacccccacctccaccccctcctaaaaaggaggccaagccagaaccaatggaagaagatcttccagagaataagaaacaggctctgaaagaaaaggagctgggaaatgatgcctacaagaagaaagattttgacaaggccctgaagcattatgacaaggccaaggagctggaccctaccaatatgacttacataactaatcaagcagctgtgcactttgagaagggcgactacaacaaatgccgggagctctgtgagaaggccattgaagtaggcagagagaaccgagaggactaccgtcagatcgccaaagcttatgctcgaattggcaattcctatttcaaagaagaaaggtacaaggatgctatccatttctacaacaagtctctggcagagcaccgaaccccagatgtgctcaagaagtgccagcaggcagagaaaattctgaaggaacaagagcgactggcttatatcaaccctgatttggctttggaggaaaagaataagggcaatgagtgcttccagaaaggggactacccccaggccatgaagcactatacagaagccattaaaaggaacccaagagatgccaaactatacagcaaccgagccgcctgctacaccaagctcctggagtttcagctggcactcaaggactgtgaagagtgcatccagctagagccaaccttcatcaagggttatacacggaaagcagctgccctggaagccatgaaggactatacaaaagccatggatgtgtaccagaaggcattagacctggactccagctgtaaggaagcagcagatggttaccaacgctgtatgatggcacagtacaacagacatgatagccctgaggatgtgaaacggcgggccatggctgaccctgaggtacagcagataatgagtgacccagccatgaggctcatcctggagcagatgcaaaaggacccccaagctctgagcgaacacttaaagaatcctgtaatagcacagaagatccagaagctgatggatgtgggtctcatcgcaattcggtga

SEQ ID NO: 1259 - DNA, 1644 bp, Rattus norvegicus
  Genbank Accession No. Z11995
gcactacaaagagaagatccacgagtacaatgtactgctagatacactgagcagagctgaagaaggttatgagaaccttctcagcccctctgacatgacccacatcaagagtgacaccctggccagcaagcacagtgaactgaaggacagactgcgtagtatcaaccagggcctagaccgcctgaggaaggtcagccaccagggctacggccccgccactgagtttgaagagccccgagtgatagatctgtgggacctggctcagtctgccaacttcactgagaaggaactggagtcgttcagggaggagcttaagcacttcgaggccaaaatcgaaaagcacaaccactaccagaagcagctggagatttcccaccagaagctgaagcacgtggagagcatcggtgaccccgagcacatcagccgcaacaaggagaagtacgtcctgctggaggagaagacaaaggagctgggctacaaggtgaagaagcatctgcaggacctgtccagcagggtctcaagggctcggcacaatgagctctgagaccagaagccactggcagtagcctagagaggctcttgaagacactgggaactgtcaacttgtcatactggtgtggctgtccacagtggcaaggagaaataccgatctgatcctgctgcggctggcaaggactaattttctttcaagcaagtgtagctgtcaccgccctggttgagggctttgggtacatctaccaatgagatatgaccggtctccatgctgcagcaaaagtttacattgaaattatataaatctgtcgccgacagtttattgaaaggaaatcttgctttatccatgaagtcacttccatggaggtagctgtgataaagtgtctcttccccatgacaacgcatagcaccaatccctactgaaagacctgcccgagtacaccaactgtcctggtggaatgacactctggagcaggaaaaacaaatttctaaaaggcatacagtgattatcttctgagctttgcagctggcaacatgtatgttttcacacaagatatttttaagctagcgaaagaaaatactcaagcaggattagttcttaaagcaataaacaggggaataaaaacatcatgtatatataagaaaaccaaggcatgctcacaggtttgagccaagaaagacctggagccctaatccccaccttgtcccaggatgcacctgtcatgatcacagggaagagatgagtctgggatttacaaacctctctctaaacctcagtccagtgttgtgccgctggctgtaccacacacaccgcacaagccccgactgctcccattccattacggcacaggagacatgttctcaccctgcctagcctgctttggtggggggaggcggcggcagggaactctacaagtgtttccagtggtgacctctgttctccctttcaggagctgttttccttcatgtagctagccccatggctaccagaaagaactagaataggagctggctgattttgtcaaaccccaaaacaaacacccctttcctccgggtcttgattttgtcacctgaatctctgggacgagtggccaaggcatttctaggcttactgcaagtatcagatgacgacataagattctagaagtcaag

SEQ ID NO: 1260 - DNA, 1311 bp, Rattus norvegicus
  Genbank Accession No. Z12298
cggttttttttttttttcaacctagtgacagtcacagagcagcaccaccccctcctcctttccacacctgcaaactctcttgcttgggctgcattacttagtgttaattacatcgcagctttgagggctccggtggcaaatacccggattaaaaggtggtgaaaacgcatgagacaaccatgaaggcaactctcgtcttattccttctggcgcaagtctcttgggctggaccatttgagcagagaggattatttgacttcatgctagaagatgaggcctctggcataatcccttacgaccctgacaatcccctgatatctatgtgcccctaccgatgccaatgccatctccgagtggtgcagtgttctgatctgggtctggacaaagtaccctgggagtttccacctgacacaacattgctagacctgcaaaacaacaaaataacagagatcaaagagggggcctttaagaacctgaaggacttgcataccttgatccttgtcaacaacaagatcagcaagatcagcccagaggcatttaaacctctagtgaagttggaaaggctttatctgtctaagaaccacctaaaggagctgcccgaaaaattgcccaaaacactccaggagcttcgactccacgacaatgagatcaccaaactgaagaaatctgtgttcaatggactgaaccgtatgattgtcatagaactgggcggcaacccactgaaaaactctgggattgaaaatggagccttgcagggaatgaagggtctcggatacatccgcatctcagacaccaacataactgctattcctcaaggtctgcccacttctatcagtgaactgcatctggatggcaacaagatcgccaaagttgatgcagccagcctgaaaggaatgtctaatttgtctaagctgggtttgagcttcaatagcatcaccgttgtggaaaatggcagtctggctaatgttcctcatctgagggagctccacttggacaacaacaaactcctcagagtgcctgctgggctggcacagcataaatatgtccaggtcgtctaccttcataacaacaacatctccgaagttgggcagcatgacttctgcctcccttcataccagactaggaagacttcctacactgccgtgagtctttatagcaaccctgtccggtattggcaaattcacccacacaccttcagatgtgtcttcgggcgctctaccattcaacttgggaactacaagtaactcccaaacagcctcatttttataatcgggaacaaaaaaaccaatctgtcaatattattgctaaaaa

SEQ ID NO: 1261 - DNA, 707 bp, Rattus norvegicus
  Genbank Accession No. Z75029
gctctgggtcggggcccaccatcgaggaggtggattagaggctctttctggcgctccaggtgtgatctaggagacagatgggtggccttgaggactttgggttattgtcgtttaggacattaactccttcgttcggtctgcaatcaagtcctaggtttaagcaaactgccttccatttactctgtggaatttcacgtgtgctttgcattcccagtaaattagtactgggagtgtgtctttgcaatagatataatttcctgccttcaagtcagcactgccccccccccgaagttatttctttgcaggacagtcagagctatattgatatagcaagaggtgtgttacaaaaacaccaggacactgttgagttcctttgtgtttggactctcccctgggcgacagtgttgaggcactgttaagtcaggagctcggggccaccggtggatcactgaaagctgagactctgttgcttctcccgtttgacactctgttgctttccttgcatggtggctcacctaaggctgagactcttgttctccttccctgtataatcttgcctggcgttgcacttgttccccagtgtgtgaactcggagatgagtttacaccaccactgttagttcacgttttttgtttttacataaccatcctgaactcaggtcaatttttagctggctatttgaaaataaacttcaaaagaacttgcca

We claim:

1. A method of predicting at least one toxic effect of a compound, comprising:
(a) preparing a gene expression profile of a tissue or cell sample exposed to the compound; and
(b) comparing the gene expression profile to a database comprising at least part of the data or information of Tables 1-5.

2. A method of claim 1, wherein the gene expression profile prepared from the tissue or cell sample comprises the level of expression for at least one gene.

3. A method of claim 2, wherein the level of expression is compared to a Tox Mean and/or NonTox Mean value in Tables 5-5L.

4. A method of claim 3, wherein the level of expression is normalized prior to comparison.

5. A method of claim 1, wherein the database comprises substantially all of the data or information in Tables 5-5L.

6. A method of predicting at least one toxic effect of a compound, comprising:
(a) detecting the level of expression in a tissue or cell sample exposed to the compound of two or more genes from Tables 1-5; wherein differential expression of the genes in Tables 1-5 is indicative of at least one toxic effect.

7. A method of predicting the progression of a toxic effect of a compound, comprising:
(a) detecting the level of expression in a tissue or cell sample exposed to the compound of two or more genes from Tables 1-5; wherein differential expression of the genes in Tables 1-5 is indicative of toxicity progression.

8. A method of predicting the renal toxicity of a compound, comprising:
(a) detecting the level of expression in a tissue or cell sample exposed to the compound of two or more genes from Tables 1-5; wherein differential expression of the genes in Tables 1-5 is indicative of renal toxicity.

9. A method of identifying an agent that modulates the onset or progression of a toxic response, comprising:
(a) exposing a cell to the agent and a known toxin; and
(b) detecting the expression level of two or more genes from Tables 1-5; wherein differential expression of the genes in Tables 1-5 is indicative of toxicity.

10. A method of predicting the cellular pathways that a compound modulates in a cell, comprising:
(a) detecting the level of expression in a tissue or cell sample exposed to the compound of two or more genes from Tables 1-5; wherein differential expression of the genes in Tables 1-5 is associated the modulation of at least one cellular pathway.

11. The method of claim 6, wherein the expression levels of at least 3 genes are detected.

12. The method of claim 6, wherein the expression levels of at least 4 genes are detected.

13. The method of claim 6, wherein the expression levels of at least 5 genes are detected.

14. The method of claim 6, wherein the expression levels of at least 6 genes are detected.

15. The method of claim 6, wherein the expression levels of at least 7 genes are detected.

16. The method of claim 6, wherein the expression levels of at least 8 genes are detected.

17. The method of claim 6, wherein the expression levels of at least 9 genes are detected.

18. The method of claim 6, wherein the two or more genes are rat genes.

19. A method of claim 6, wherein the effect is selected from the group consisting of nephritis, kidney necrosis, glomerular and tubular injury, and focal segmental glomerulosclerosis.

20. A method of claim 8, wherein the renal toxicity is associated with at least one kidney disease pathology selected from the group consisting of nephritis, kidney necrosis, glomerular and tubular injury, and focal segmental glomerulosclerosis.

21. A method of claim 10, wherein the cellular pathway is modulated by a toxin selected from the group consisting of indomethacin, diflunisal, colchicine, chloroform, diclofenac, menadione, sodium chromate, sodium oxalate, thioacetamide and vancomycin.

22. A set of at least two probes, wherein each of the probes comprises a sequence that specifically hybridizes to a gene in Tables 1-5.

23. A set of probes according to claim 22, wherein the set comprises probes that hybridize to at least 3 genes.

24. A set of probes according to claim 22, wherein the set comprises probes that hybridize to at least 5 genes.

25. A set of probes according to claim 22, wherein the set comprises probes that hybridize to at least 7 genes.

26. A set of probes according to claim 22, wherein the set comprises probes that hybridize to at least 10 genes.

27. A set of probes according to any one of claims 22-26, wherein the probes are attached to a solid support.

28. A set of probes according to claim 27, wherein the solid support is selected from the group consisting of a membrane, a glass support and a silicon support.

29. A solid support comprising at least two probes, wherein each of the probes comprises a sequence that specifically hybridizes to a gene in Tables 1-5.

30. A solid support of claim 29, wherein the gene is a rat gene.

31. A solid support of claim 29, wherein the array comprises at least about 100 different oligonucleotides in discrete locations per square centimeter.

32. A solid support of claim 29, wherein the array comprises at least about 1000 different oligonucleotides in discrete locations per square centimeter.

33. A solid support of claim 29, wherein the array comprises at least about 10,000 different oligonucleotides in discrete locations per square centimeter.

34. A computer system comprising:
(a) a database containing information identifying the expression level in a tissue or cell sample exposed to a renal toxin of a set of genes comprising at least two genes in Tables 1-5; and
(b) a user interface to view the information.

35. A computer system of claim 34, wherein the database further comprises sequence information for the genes.

36. A computer system of claim 34, wherein the database further comprises information identifying the expression level for the set of genes in the tissue or cell sample before exposure to a renal toxin.

37. A computer system of claim 34, wherein the database further comprises information identifying the expression level of the set of genes in a tissue or cell sample exposed to at least a second renal toxin.

38. A computer system of claim 34, further comprising records including descriptive information from an external database, which information correlates said genes to records in the external database.

39. A computer system of claim 38, wherein the external database is GenBank.

40. A method of using a computer system of any one of claims 34-37 to present information identifying the expression level in a tissue or cell of at least one gene in Tables 1-5, comprising:
comparing the expression level of at least one gene in Tables 1-5 in a tissue or cell exposed to a test agent to the level of expression of the gene in the database.

41. A method of claim 40, wherein the expression levels of at least two genes are compared.

42. A method of claim 40, wherein the expression levels of at least five genes are compared.

43. A method of claim 40, wherein the expression levels of at least ten genes are compared.

44. A method of claim 40, further comprising the step of displaying the level of expression of at least one gene in the tissue or cell sample compared to the expression level when exposed to a toxin.

45. A method of claim 9, wherein the known toxin is a renal toxin.

46. A method of claim 42, wherein the renal toxin is selected from the group consisting of indomethacin, diflunisal, colchicine, chloroform, diclofenac, menadione, sodium chromate, sodium oxalate, thioacetamide and vancomycin.

47. A method of any one of claims 6-10, wherein nearly all of the genes in Tables 1-5 are detected.

48. A method of claim 47, wherein all of the genes in at least one of Tables 5-5L are detected.

49. A kit comprising at least one solid support of any one of claims 29-33 packaged with gene expression information for said genes.

50. A kit of claim 49, wherein the gene expression information comprises gene expression levels in a tissue or cell sample exposed to a renal toxin.

51. A kit of claim 50, wherein the gene expression information is in an electronic format.

52. A method of any one of claims 6-10, wherein the compound exposure is in vivo or in vitro.

53. A method of any one of claims 6-10, wherein the level of expression is detected by an amplification or hybridization assay.

54. A method of claim 53, wherein the amplification assay is quantitative or semi-quantitative PCR.

55. A method of claim 53, wherein the hybridization assay is selected from the group consisting of Northern blot, dot or slot blot, nuclease protection and microarray assays.

56. A method of identifying an agent that modulates at least one activity of a protein encoded by a gene in Tables 1-5 comprising:
(a) exposing the protein to the agent; and
(b) assaying at least one activity of said protein.

57. A method of claim 56, wherein the agent is exposed to a cell expressing the protein.

58. A method of claim 57, wherein the cell is exposed to a known toxin.

59. A method of claim 58 wherein the toxin modulates the expression of the protein.

60. A computer system of claim 34, wherein the genes are rat genes.
